(19) United States
(12) Patent Application Publication
(10) Pub. No.: US 2025/0026814 A1
(43) Pub. Date: Jan. 23, 2025

(54) POLYPEPTIDES FOR DETECTION AND TREATMENT OF CORONAVIRUS INFECTION

(71) Applicant: THE UNIVERSITY OF CHICAGO, Chicago, IL (US)

(72) Inventors: Patrick WILSON, Chicago, IL (US); Siriruk CHANGROB, Chicago, IL (US); Haley DUGAN, Chicago, IL (US); Christopher STAMPER, Chicago, IL (US)

(73) Assignee: THE UNIVERSITY OF CHICAGO, Chicago, IL (US)

(21) Appl. No.: 18/710,900

(22) PCT Filed: Nov. 16, 2022
(86) PCT No.: PCT/US2022/079916

§ 371 Date: May 16, 2024

Related U.S. Application Data
(60) Provisional application No. 63/264,173, filed on Nov. 16, 2021.

(51) Int. Cl. C07K 16/10; A61K 31/573; A61K 31/675; A61K 39/00; A61P 31/14; G01N 33/569

(52) U.S. Cl. CPC C07K 16/1003; A61K 31/573; A61K 31/675; A61P 31/14; G01N 33/56983; A61K 2039/505; C07K 2317/14; C07K 2317/24; C07K 2317/31; C07K 2317/35; C07K 2317/565; C07K 2317/567; C07K 2317/76; C07K 2317/92; G01N 2333/165

(57) ABSTRACT

Here, the inventors report that natural WT SARS-CoV-2 infection induces memory B cells expressing potently neutralizing antibodies against VOCs. Moreover, natural WT infection largely induced antibodies against spike epitopes outside of the RBD, most of which were non-neutralizing against WT and VOCs. Additionally. RBD-binding antibodies could be categorized into 3 distinct classes based on their binding profiles against RBD mutant constructs. The inventors identified VOC-neutralizing antibodies against three distinct regions of the spike protein, including the two epitopes on the RBD and one epitope in the NTD. Together, this study identifies that natural WT infection induces memory B cells that can produce neutralizing antibodies against recent SARS-CoV-2 VOCs and have the potential to be recalled by vaccination.

### CROSS-REFERENCE TO RELATED APPLICATIONS

[0001] This application claims the benefit of priority of U.S. Provisional Patent Application No. 63/264,173 filed Nov. 16, 2021, which is hereby incorporated by reference in its entirety.

### STATEMENT OF GOVERNMENT SUPPORT

[0002] This invention was made with government support under Grant Numbers 75N93019C00062 and 75N93019C00051, awarded by the National Institutes of Health. The government has certain rights in the invention.

### SEQUENCE LISTING

[0003] The application contains a Sequence Listing prepared in compliance with ST.26 format and is hereby incorporated by reference in its entirety. Said Sequence Listing, created on Nov. 11, 2022 is named ARCDP0724WO.xml and is 1,777,457 bytes in size.

### BACKGROUND

### I. Field of the Invention

[0004] Aspects of the invention relate to at least the fields of virology and molecular biology.

### II. Background

[0005] The emergence of novel circulating SARS-CoV-2 variants of concern (VOCs) have recently proven to undermine the protective effects of infection- and vaccination-induced humoral immunity¹⁻⁴. All approved vaccines against SARS-CoV-2 drive a neutralizing antibody response against the spike protein, the major target of neutralizing antibodies elicited by natural infection^{3, 5}. However, protective humoral immunity against the spike protein induced by vaccination or infection with the original wildtype (WT) virus may be attenuated due to the widespread circulation of variants². The first reported mutation of the SARS-CoV-2 spike protein, D614G, arose in the C-terminal domain (CTD) and evolved due to increased stability of the spike rather than a mutation to escape host immunity⁶. More recently, mutations have arisen within the receptor-binding domain (RBD), N-terminal domain (NTD) of S1, and S2 that have resulted in emergence of several circulating viral variants that are rapidly becoming the dominant strains around the globe². The B.1.1.7 lineage or alpha VOC, first found in the United Kingdom, has been reported to have a >50% increased transmissibility among humans⁷⁻¹⁰. Of greatest concern is the substitution at position 484 in the RBD, which is exclusively shared by the VOCs, variants of interest (VOIs) and variants under monitoring (VUMs) originally identified in South Africa (B.1.351; beta), Brazil (P.1; gamma), Texas (R.1), Columbia (B.1.621; mu), New York (B.1.526; iota) and India (B.1.617.1; kappa)^{2, 3, 11-15}. VOCs possessing a mutation at E484, either E484K and E484Q, can partially evade neutralizing humoral immunity induced by either natural infection or vaccination and, in rare cases, lead to reinfection and infection, respectively^{11-13, 16-18}. Other emerging variants have acquired a mutation at L452R within the RBD, which is found in B.1.1.298, a variant capable of interspecies transmission between humans and minks, and B.1.427/B.1.429 (epsilon) isolated in southern California¹⁹. Moreover, the B.1.617.1 (kappa) found in India possesses both L452R and E484Q mutations within the RBD^{15, 20}. The most recent VOC, B.1.617.2 (delta), is responsible for a surge in both cases and fatalities in several countries, especially where vaccination rates are low^{4, 21-23}. Intriguingly, the B. 1.617 lineages contain P681R, a mutation that enhances and accelerates viral fusion²⁴ and which is also present in the dominant variant in Uganda, A.23.1²⁵. Thus, understanding the impact of these various mutations on the neutralization capacity of antibodies elicited by current vaccine formulations or natural exposure to wildtype (WT) SARS-CoV-2 is urgently needed to develop critical next-generation vaccine strategies against SARS-CoV-2 variants.

### SUMMARY

[0006] Here, the inventors report that natural WT SARS-CoV-2 infection induces memory B cells expressing potently neutralizing antibodies against VOCs. Moreover, natural WT infection largely induced antibodies against spike epitopes outside of the RBD, most of which were non-neutralizing against WT and VOCs. Additionally, RBD-binding antibodies could be categorized into 3 distinct classes based on their binding profiles against RBD mutant constructs. The inventors identified VOC-neutralizing antibodies against three distinct regions of the spike protein, including the two epitopes on the RBD and one epitope in the NTD. Together, this study identifies that natural WT infection induces memory B cells that can produce neutralizing antibodies against recent SARS-CoV-2 VOCs and have the potential to be recalled by vaccination.

[0007] The disclosure describes novel antibody and antigen binding fragments. Also described are polypeptides comprising the antigen binding fragment(s) of the disclosure, and compositions comprising the polypeptides, antibodies, and/or antigen binding fragments of the disclosure. Also described are nucleic acids encoding an antibody or antigen binding fragment of the disclosure. The disclosure also relates to nucleic acids encoding an antibody heavy chain, wherein the nucleic acid has at least 60, 61, 62, 63, 64, 65, 66, 67, 68, 69, 70, 71, 72, 73, 74, 75, 76, 77, 78, 79, 80, 81, 82, 83, 84, 85, 86, 87, 88, 89, 90, 91, 92, 93, 94, 95, 96, 97, 98, 99, or 100% (or any derivable range therein) sequence identity to one of the nucleic acid sequences of a heavy chain of Table 2. Also described are nucleic acids encoding an antibody light chain of the disclosure, wherein the nucleic acid has at least 60, 61, 62, 63, 64, 65, 66, 67, 68, 69, 70, 71, 72, 73, 74, 75, 76, 77, 78, 79, 80, 81, 82, 83, 84, 85, 86, 87, 88, 89, 90, 91, 92, 93, 94, 95, 96, 97, 98, 99, or 100% (or any derivable range therein) sequence identity to one of the nucleic acid sequences of a light chain of Table 2. Also provided are vectors or expression vectors comprising nucleic acids of the disclosure and host cells comprising polypeptides, nucleic acids, vectors, antibodies, or antigen binding fragments of the disclosure. The nucleic acids of the disclosure may be DNA or RNA.

[0008] Also described is a method of a making a cell comprising transferring one or more nucleic acid(s) of the disclosure into a cell. The method may further comprise culturing the cell under conditions that allow for expression of a polypeptide from the nucleic acid. The method may further comprise isolating the expressed polypeptide. Also described is a method for producing a polypeptide comprising transferring one or more nucleic acid(s) or vector(s) of the disclosure into a cell and isolating polypeptides expressed from the nucleic acid. Methods also include a method for producing a polypeptide comprising culturing cells comprising nucleic acid(s) or vectors of the disclosure and isolating polypeptides expressed from the nucleic acid. The cell may be further defined as a human cell, B cell, T cell, Chinese hamster ovary, NS0 murine myeloma cell, PER.C6 cell, or a cell described herein.

[0009] Methods include a method for treating, preventing, vaccinating against, and/or inducing an immune response against a coronavirus infection in a subject, the method comprising administering to the subject an antibody, antigen binding fragment, polypeptide, nucleic acid, or host cell of the disclosure. Also provided is a method for evaluating a sample from a subject, the method comprising contacting a biological sample from the subject, or extract thereof, with at least one antibody, antigen binding fragment, or polypeptide of the disclosure. Also disclosed is a method for diagnosing a SARS-CoV-2 infection in a subject, the method comprising contacting a biological sample from the subject, or extract thereof, with at least one antibody, antigen binding fragment, or polypeptide of any one of the disclosure. The compositions of the disclosure may be formulated as a vaccine for the treatment or prevention of a coronavirus infection. The antibodies, antigen binding fragments, or compositions of the disclosure may be used in a vaccine for preventing coronaviral infections in a subject that does not have a coronaviral infection. The antibodies, antigen binding fragments, or compositions of the disclosure may be used to treat a subject having a coronaviral infection.

[0010] The disclosure describes an antibody or antigen binding fragment comprising a heavy chain variable region and a light chain variable region: (i) wherein the heavy chain variable region comprises a HCDR1, HCDR2, and HCDR3 having at least 80% sequence identity to the HCDR1, HCR2, HCR3 of SEQ ID NOs: 1565, 1566, and 1567 and wherein the light chain variable region comprises a LCDR1, LCDR2, and LCDR3 having at least 80% sequence identity to the LCDR1, LCDR2, and LCDR3 of SEQ ID NOs: 1572, 1573, and 1574; (ii) wherein the heavy chain variable region comprises a HCDR1, HCDR2, and HCDR3 having at least 80% sequence identity to the HCDR1, HCR2, HCR3 of SEQ ID NOs: 1457, 1458, and 1459 and wherein the light chain variable region comprises a LCDR1, LCDR2, and LCDR3 having at least 80% sequence identity to the LCDR1, LCDR2, and LCDR3 of SEQ ID NOs: 1464, 1465, and 1466; or (iii) wherein the heavy chain variable region comprises a HCDR1, HCDR2, and HCDR3 having at least 80% sequence identity to the HCDR1, HCR2, HCR3 of SEQ ID NOs: 1492, 243, and 1493 and wherein the light chain variable region comprises a LCDR1, LCDR2, and LCDR3 having at least 80% sequence identity to the LCDR1, LCDR2, and LCDR3 of SEQ ID NOs: 1497, 1498, and 1499.

[0011] The disclosure describes an antibody or antigen binding fragment comprising a heavy chain variable region and a light chain variable region: (i) wherein the heavy chain variable region comprises a HCDR1, HCDR2, and HCDR3 having or having at least 60, 61, 62, 63, 64, 65, 66, 67, 68, 69, 70, 71, 72, 73, 74, 75, 76, 77, 78, 79, 80, 81, 82, 83, 84, 85, 86, 87, 88, 89, 90, 91, 92, 93, 94, 95, 96, 97, 98, 99, or 100% (or any derivable range therein) sequence identity to the HCDR1, HCR2, HCR3 of SEQ ID NOs: 1565, 1566, and 1567 and wherein the light chain variable region comprises a LCDR1, LCDR2, and LCDR3 having or having at least 60, 61, 62, 63, 64, 65, 66, 67, 68, 69, 70, 71, 72, 73, 74, 75, 76, 77, 78, 79, 80, 81, 82, 83, 84, 85, 86, 87, 88, 89, 90, 91, 92, 93, 94, 95, 96, 97, 98, 99, or 100% (or any derivable range therein) sequence identity to the LCDR1, LCDR2, and LCDR3 of SEQ ID NOs: 1572, 1573, and 1574; (ii) wherein the heavy chain variable region comprises a HCDR1, HCDR2, and HCDR3 having or having at least 60, 61, 62, 63, 64, 65, 66, 67, 68, 69, 70, 71, 72, 73, 74, 75, 76, 77, 78, 79, 80, 81, 82, 83, 84, 85, 86, 87, 88, 89, 90, 91, 92, 93, 94, 95, 96, 97, 98, 99, or 100% (or any derivable range therein) sequence identity to the HCDR1, HCR2, HCR3 of SEQ ID NOs: 1457, 1458, and 1459 and wherein the light chain variable region comprises a LCDR1, LCDR2, and LCDR3 having or having at least 60, 61, 62, 63, 64, 65, 66, 67, 68, 69, 70, 71, 72, 73, 74, 75, 76, 77, 78, 79, 80, 81, 82, 83, 84, 85, 86, 87, 88, 89, 90, 91, 92, 93, 94, 95, 96, 97, 98, 99, or 100% (or any derivable range therein) sequence identity to the LCDR1, LCDR2, and LCDR3 of SEQ ID NOs: 1464, 1465, and 1466; or (iii) wherein the heavy chain variable region comprises a HCDR1, HCDR2, and HCDR3 having or having at least 60, 61, 62, 63, 64, 65, 66, 67, 68, 69, 70, 71, 72, 73, 74, 75, 76, 77, 78, 79, 80, 81, 82, 83, 84, 85, 86, 87, 88, 89, 90, 91, 92, 93, 94, 95, 96, 97, 98, 99, or 100% (or any derivable range therein) sequence identity to the HCDR1, HCR2, HCR3 of SEQ ID NOs: 1492, 243, and 1493 and wherein the light chain variable region comprises a LCDR1, LCDR2, and LCDR3 having or having at least 60, 61, 62, 63, 64, 65, 66, 67, 68, 69, 70, 71, 72, 73, 74, 75, 76, 77, 78, 79, 80, 81, 82, 83, 84, 85, 86, 87, 88, 89, 90, 91, 92, 93, 94, 95, 96, 97, 98, 99, or 100% (or any derivable range therein) sequence identity to the LCDR1, LCDR2, and LCDR3 of SEQ ID NOs: 1497, 1498, and 1499.

[0012] The antibody or antigen binding fragment may have a heavy chain variable region comprising a HCDR1, HCDR2, and HCDR3 having the amino acid sequence of SEQ ID NOs: 1565, 1566, and 1567 and a light chain variable region comprising a LCDR1, LCDR2, and LCDR3 having the amino acid sequence of SEQ ID NOs: 1572, 1573, and 1574. The antibody or antigen binding fragment may have a heavy chain variable region comprising a HCDR1, HCDR2, and HCDR3 having the amino acid sequence of SEQ ID NOs: 1457, 1458, and 1459 and a light chain variable region comprising a LCDR1, LCDR2, and LCDR3 comprising the amino acid sequence of SEQ ID NOs: 1464, 1465, and 1466. The antibody or antigen binding fragment may have a heavy chain variable region comprising a HCDR1, HCDR2, and HCDR3 having the amino acid sequence of SEQ ID NOs: 1492, 243, and 1493 and a light chain variable region having the amino acid sequence of SEQ ID NOs: 1497, 1498, and 1499.

[0013] The heavy chain may comprise an amino acid sequence with at least 80% sequence identity to SEQ ID NO: 1563 or 1564 and/or the light chain may comprise an amino acid sequence with at least 80% sequence identity to SEQ ID NO: 1570 or 1571. The heavy chain may comprise an amino acid sequence with at least 80% sequence identity to SEQ ID NO: 1455 or 1456 and/or the light chain may comprise an amino acid sequence with at least 80% sequence identity to SEQ ID NO: 1462 or 1463. The heavy chain may comprise an amino acid sequence with at least 80% sequence identity to SEQ ID NO: 1490 or 1491 and/or the light chain may comprise an amino acid sequence with at least 80% sequence identity to SEQ ID NO:1495 or 1496. The heavy chain may comprise an amino acid sequence having or having at least 60, 61, 62, 63, 64, 65, 66, 67, 68, 69, 70, 71, 72, 73, 74, 75, 76, 77, 78, 79, 80, 81, 82, 83, 84, 85, 86, 87, 88, 89, 90, 91, 92, 93, 94, 95, 96, 97, 98, 99, or 100% (or any derivable range therein) sequence identity to SEQ ID NO: 1563 or 1564 and/or the light chain may comprise an amino acid sequence having or having at least 60, 61, 62, 63, 64, 65, 66, 67, 68, 69, 70, 71, 72, 73, 74, 75, 76, 77, 78, 79, 80, 81, 82, 83, 84, 85, 86, 87, 88, 89, 90, 91, 92, 93, 94, 95, 96, 97, 98, 99, or 100% (or any derivable range therein) sequence identity to SEQ ID NO:1570 or 1571. The heavy chain may comprise an amino acid sequence having or having at least 60, 61, 62, 63, 64, 65, 66, 67, 68, 69, 70, 71, 72, 73, 74, 75, 76, 77, 78, 79, 80, 81, 82, 83, 84, 85, 86, 87, 88, 89, 90, 91, 92, 93, 94, 95, 96, 97, 98, 99, or 100% (or any derivable range therein) sequence identity to SEQ ID NO:1455 or 1456 and/or the light chain may comprise an amino acid sequence having or having at least 60, 61, 62, 63, 64, 65, 66, 67, 68, 69, 70, 71, 72, 73, 74, 75, 76, 77, 78, 79, 80, 81, 82, 83, 84, 85, 86, 87, 88, 89, 90, 91, 92, 93, 94, 95, 96, 97, 98, 99, or 100% (or any derivable range therein) sequence identity to SEQ ID NO:1462 or 1463. The heavy chain may comprise an amino acid sequence having or having at least 60, 61, 62, 63, 64, 65, 66, 67, 68, 69, 70, 71, 72, 73, 74, 75, 76, 77, 78, 79, 80, 81, 82, 83, 84, 85, 86, 87, 88, 89, 90, 91, 92, 93, 94, 95, 96, 97, 98, 99, or 100% (or any derivable range therein) sequence identity to SEQ ID NO: 1490 or 1491 and/or the light chain may comprise an amino acid sequence having or having at least 60, 61, 62, 63, 64, 65, 66, 67, 68, 69, 70, 71, 72, 73, 74, 75, 76, 77, 78, 79, 80, 81, 82, 83, 84, 85, 86, 87, 88, 89, 90, 91, 92, 93, 94, 95, 96, 97, 98, 99, or 100% (or any derivable range therein) sequence identity to SEQ ID NO:1495 or 1496.

[0014] The antibody or antigen binding fragment may comprise a heavy chain comprising the amino acid sequence of SEQ ID NO: 1563 or 1564 and/or a light chain comprising the amino acid sequence of SEQ ID NO:1570 or 1571. The antibody or antigen binding fragment may comprise a heavy chain comprising the amino acid sequence of SEQ ID NO: 1455 or 1456 and/or a light chain comprising the amino acid sequence of SEQ ID NO: 1462 or 1463. The antibody or antigen binding fragment may comprise a heavy chain comprising the amino acid sequence of SEQ ID NO: 1490 or 1491 and/or a light chain comprising the amino acid sequence of SEQ ID NO:1495 or 1496.

[0015] The antibody or antigen binding fragment may comprise a heavy chain framework region (HFR) 1, HFR2, HFR3, and HFR4 and light chain framework region (LFR) 1, LFR2, LFR3, and LFR4 and wherein the HFR1, HFR2, HFR3, and HFR4 comprises an amino acid sequence with at least 80% sequence identity to SEQ ID NOs: 1568, 130, 1569, and 60, respectively, and the LFR1, LFR2, LFR3, and LFR4 comprises an amino acid sequence with at least 80% sequence identity to SEQ ID NOs: 1575, 950, 1576, and 69. The antibody or antigen binding fragment may comprise a heavy chain framework region HFR1, HFR2, HFR3, and HFR4 and light chain framework region LFR1, LFR2, LFR3, and LFR4, and wherein the HFR1, HFR2, HFR3, and HFR4 comprises an amino acid sequence with at least 80% sequence identity to SEQ ID NOs: 1460, 1461, 146, and 60, respectively, and the LFR1, LFR2, LFR3, and LFR4 comprises an amino acid sequence with at least 80% sequence identity to SEQ ID NOs: 1467, 1468, 1469, and 53. The antibody or antigen binding fragment may comprise a heavy chain framework region HFR1, HFR2, HFR3, and HFR4 and light chain framework region LFR1, LFR2, LFR3, and LFR4, and wherein the HFR1, HFR2, HFR3, and HFR4 comprises an amino acid sequence with at least 80% sequence identity to SEQ ID NOs: 245, 7, 1494, and 44, respectively, and the LFR1, LFR2, LFR3, and LFR4 comprises an amino acid sequence with at least 80% sequence identity to SEQ ID NOs: 1500, 1501, 1502, and 18.

[0016] The antibody or antigen binding fragment may comprise a heavy chain framework region (HFR) 1, HFR2, HFR3, and HFR4 and light chain framework region (LFR) 1, LFR2, LFR3, and LFR4 and wherein the HFR1, HFR2, HFR3, and HFR4 comprises an amino acid sequence having or having at least 60, 61, 62, 63, 64, 65, 66, 67, 68, 69, 70, 71, 72, 73, 74, 75, 76, 77, 78, 79, 80, 81, 82, 83, 84, 85, 86, 87, 88, 89, 90, 91, 92, 93, 94, 95, 96, 97, 98, 99, or 100% (or any derivable range therein) sequence identity to SEQ ID NOs: 1568, 130, 1569, and 60, respectively, and the LFR1, LFR2, LFR3, and LFR4 comprises an amino acid sequence having or having at least 60, 61, 62, 63, 64, 65, 66, 67, 68, 69, 70, 71, 72, 73, 74, 75, 76, 77, 78, 79, 80, 81, 82, 83, 84, 85, 86, 87, 88, 89, 90, 91, 92, 93, 94, 95, 96, 97, 98, 99, or 100% (or any derivable range therein) sequence identity to SEQ ID NOs: 1575, 950, 1576, and 69. The antibody or antigen binding fragment may comprise a heavy chain framework region HFR1, HFR2, HFR3, and HFR4 and light chain framework region LFR1, LFR2, LFR3, and LFR4, and wherein the HFR1, HFR2, HFR3, and HFR4 comprises an amino acid sequence having or having at least 60, 61, 62, 63, 64, 65, 66, 67, 68, 69, 70, 71, 72, 73, 74, 75, 76, 77, 78, 79, 80, 81, 82, 83, 84, 85, 86, 87, 88, 89, 90, 91, 92, 93, 94, 95, 96, 97, 98, 99, or 100% (or any derivable range therein) sequence identity to SEQ ID NOs: 1460, 1461, 146, and 60, respectively, and the LFR1, LFR2, LFR3, and LFR4 comprises an amino acid sequence having or having at least 60, 61, 62, 63, 64, 65, 66, 67, 68, 69, 70, 71, 72, 73, 74, 75, 76, 77, 78, 79, 80, 81, 82, 83, 84, 85, 86, 87, 88, 89, 90, 91, 92, 93, 94, 95, 96, 97, 98, 99, or 100% (or any derivable range therein) sequence identity to SEQ ID NOs: 1467, 1468, 1469, and 53. The antibody or antigen binding fragment may comprise a heavy chain framework region HFR1, HFR2, HFR3, and HFR4 and light chain framework region LFR1, LFR2, LFR3, and LFR4, and wherein the HFR1, HFR2, HFR3, and HFR4 comprises an amino acid sequence having or having at least 60, 61, 62, 63, 64, 65, 66, 67, 68, 69, 70, 71, 72, 73, 74, 75, 76, 77, 78, 79, 80, 81, 82, 83, 84, 85, 86, 87, 88, 89, 90, 91, 92, 93, 94, 95, 96, 97, 98, 99, or 100% (or any derivable range therein) sequence identity to SEQ ID NOs: 245, 7, 1494, and 44, respectively, and the LFR1, LFR2, LFR3, and LFR4 comprises an amino acid sequence having or having at least 60, 61, 62, 63, 64, 65, 66, 67, 68, 69, 70, 71, 72, 73, 74, 75, 76, 77, 78, 79, 80, 81, 82, 83, 84, 85, 86, 87, 88, 89, 90, 91, 92, 93, 94, 95, 96, 97, 98, 99, or 100% (or any derivable range therein) sequence identity to SEQ ID NOs: 1500, 1501, 1502, and 18.

[0017] The antibody or antigen binding fragment may comprise a HFR1, HFR2, HFR3, and HFR4 comprising the amino acid sequence of SEQ ID NOs: 1568, 130, 1569, and 60, and a LFR1, LFR2, LFR3, and LFR4 comprising the amino acid sequence of SEQ ID NOs: 1575, 950, 1576, and 69. The antibody or antigen binding fragment may comprise a HFR1, HFR2, HFR3, and HFR4 comprising the amino acid sequence of SEQ ID NOs: 1460, 1461, 146, and 60, and a LFR1, LFR2, LFR3, and LFR4 comprising the amino acid sequence of SEQ ID NOs: 1467, 1468, 1469, and 53. The antibody or antigen binding fragment may comprise a HFR1, HFR2, HFR3, and HFR4 comprising the amino acid sequence of SEQ ID NOs: 245, 7, 1494, and 44, and a LFR1, LFR2, LFR3, and LFR4 comprising the amino acid sequence of SEQ ID NOs: 1500, 1501, 1502, and 18.

[0018] The disclosure describes an antibody or antigen binding fragment comprising a heavy chain variable region and a light chain variable region, wherein the heavy chain variable region comprises a HCDR1, HCDR2, and HCDR3 from a heavy chain variable region of an antibody clone of Table 1 and wherein the light chain variable region comprises a LCDR1, LCDR2, and LCDR3 from the light chain variable region of the same clone of Table 1. Also described is an antibody or antigen binding fragment comprising a heavy chain variable region and a light chain variable region, wherein the heavy chain variable region comprises a HCDR1, HCDR2, and HCDR3 having or having at least 80% sequence identity or having or having at least 60, 61, 62, 63, 64, 65, 66, 67, 68, 69, 70, 71, 72, 73, 74, 75, 76, 77, 78, 79, 80, 81, 82, 83, 84, 85, 86, 87, 88, 89, 90, 91, 92, 93, 94, 95, 96, 97, 98, 99, or 100% (or any derivable range therein) sequence identity with a HCDR1, HCDR2, and HCDR3 from a heavy chain variable region of an antibody clone of Table 1 and wherein the light chain variable region comprises a LCDR1, LCDR2, and LCDR3 having or having at least 80% sequence identity or having or having at least 60, 61, 62, 63, 64, 65, 66, 67, 68, 69, 70, 71, 72, 73, 74, 75, 76, 77, 78, 79, 80, 81, 82, 83, 84, 85, 86, 87, 88, 89, 90, 91, 92, 93, 94, 95, 96, 97, 98, 99, or 100% (or any derivable range therein) sequence identity with a LCDR1, LCDR2, and LCDR3 from the light chain variable region of the same clone of Table 1. The HCDR1, HCDR2, HCDR3, LCDR1, LCDR2, and/or LCDR3 may be determined from the variable region sequences by methods known in the art. The CDR may be a HCDR1, HCDR2, HCDR3, LCDR1, LCDR2, and/or LCDR3 determined by the Chothia method. The CDR may be a HCDR1, HCDR2, HCDR3, LCDR1, LCDR2, and/or LCDR3 determined by the Kabat method. The CDR may be a HCDR1, HCDR2, HCDR3, LCDR1, LCDR2, and/or LCDR3 determined by the IMGT method.

[0019] Also described is an antibody or antigen binding fragment in which the HCDR1, HCDR2, HCDR2, LCDR1, LCDR2, and LCDR3 each comprise an amino acid sequence that has at least 80% sequence identity to an HCDR1, HCDR2, HCDR2, LCDR1, LCDR2, and LCDR3 of Table 1, wherein the HCDR1, HCDR2, HCDR2, LCDR1, LCDR2, and LCDR3 are from the same antibody clone. The HCDR1, HCDR2, HCDR2, LCDR1, LCDR2, and LCDR3 may each comprise an amino acid sequence that has or has at least 60, 61, 62, 63, 64, 65, 66, 67, 68, 69, 70, 71, 72, 73, 74, 75, 76, 77, 78, 79, 80, 81, 82, 83, 84, 85, 86, 87, 88, 89, 90, 91, 92, 93, 94, 95, 96, 97, 98, 99, or 100% (or any derivable range therein) sequence identity to an HCDR1, HCDR2, HCDR2, LCDR1, LCDR2, and LCDR3 of Table 1, wherein the HCDR1, HCDR2, HCDR2, LCDR1, LCDR2, and LCDR3 are from the same antibody clone. The HCDR1, HCDR2, HCDR2, LCDR1, LCDR2, and LCDR3 may each comprise the amino acid sequence of an HCDR1, HCDR2, HCDR2, LCDR1, LCDR2, and LCDR3 of Table 1, wherein the HCDR1, HCDR2, HCDR2, LCDR1, LCDR2, and LCDR3 are from the same antibody clone.

[0020] Also described is an antibody or antigen binding fragment comprising a heavy chain variable region and a light chain variable region, wherein the heavy chain variable region comprises a HCDR1, HCDR2, and HCDR3 having at least 60, 61, 62, 63, 64, 65, 66, 67, 68, 69, 70, 71, 72, 73, 74, 75, 76, 77, 78, 79, 80, 81, 82, 83, 84, 85, 86, 87, 88, 89, 90, 91, 92, 93, 94, 95, 96, 97, 98, 99, or 100% (or any derivable range therein) sequence identity to the HCDR1, HCR2, HCR3 from a heavy chain variable region of a antibody clone of Table 1 and wherein the light chain variable region comprises a LCDR1, LCDR2, and LCDR3 having or having at least 60, 61, 62, 63, 64, 65, 66, 67, 68, 69, 70, 71, 72, 73, 74, 75, 76, 77, 78, 79, 80, 81, 82, 83, 84, 85, 86, 87, 88, 89, 90, 91, 92, 93, 94, 95, 96, 97, 98, 99, or 100% (or any derivable range therein) sequence identity to the LCDR1, LCDR2, and LCDR3 from the light chain variable region of the same antibody clone of Table 1. The antibody or antigen binding fragment may comprise a heavy chain variable region and a light chain variable region, wherein the heavy chain variable region comprises a HCDR1, HCDR2, and HCDR3 having or having at least 80% sequence identity to the HCDR1, HCR2, HCR3 from a heavy chain variable region of a antibody clone of Table 1 and wherein the light chain variable region comprises a LCDR1, LCDR2, and LCDR3 having at least 80% sequence identity to the LCDR1, LCDR2, and LCDR3 from the light chain variable region of the same antibody clone of Table 1. In some aspects, the heavy chain variable region comprises a HCDR1, HCDR2, and HCDR3 having the amino acid sequence of an of a HCDR1, HCDR2, and HCDR3 of a clone of Table 1 and the light chain variable region comprises a LCDR1, LCDR2, and LCDR3 comprising the amino acid sequence of the LCDR1, LCDR2, and LCDR3 from the light chain variable region of the same clone of Table 1.

[0021] The polypeptides of the disclosure may comprise at least two antigen binding fragments or antibodies, wherein each antigen binding fragment or antibody is independently selected from an antigen binding fragment or antibody of the disclosure, such as those disclosed in Table 1. The polypeptide may be multivalent. The polypeptide may be multispecific. The polypeptide may be bispecific. The polypeptide may comprise, comprise at least, or comprise at most 1, 2, 3, 4, 5, 6, 7, 8, 9, or 10 antigen binding regions or antibodies. Each antigen binding region or antibody may be independently selected from an antigen binding region or antibody of the disclosure, such as those in Table 1. The polypeptide may have repeated units of the same antigen binding region, such as at least, at most, or exactly 1, 2, 3, 4, 5, 6, 7, 8, 9, or 10 repeated units.

[0022] The heavy chain variable region may comprise an amino acid sequence with at least 80% sequence identity to a heavy chain variable region of an antibody clone of Table 1 and/or the light chain variable region may comprise an amino acid sequence with at least 80% sequence identity to the light chain variable region of the same antibody clone of Table 1. The heavy chain variable region may comprise an amino acid sequence having or having at least 60, 61, 62, 63, 64, 65, 66, 67, 68, 69, 70, 71, 72, 73, 74, 75, 76, 77, 78, 79, 80, 81, 82, 83, 84, 85, 86, 87, 88, 89, 90, 91, 92, 93, 94, 95, 96, 97, 98, 99, or 100% (or any derivable range therein) sequence identity to a heavy chain variable region of an antibody clone of Table 1 and/or the light chain variable region may comprise an amino acid sequence having or having at least 60, 61, 62, 63, 64, 65, 66, 67, 68, 69, 70, 71, 72, 73, 74, 75, 76, 77, 78, 79, 80, 81, 82, 83, 84, 85, 86, 87, 88, 89, 90, 91, 92, 93, 94, 95, 96, 97, 98, 99, or 100% (or any derivable range therein) sequence identity to the light chain variable region of the same antibody clone of Table 1. The heavy chain variable region may comprise the amino acid sequence of a heavy chain variable region of an antibody clone of Table 1 and/or the light chain variable region may comprise the amino acid sequence of the same antibody clone of Table 1. The antibody or antigen binding fragment may comprise a heavy chain framework region (HFR) 1, HFR2, HFR3, and HFR4 and light chain framework region (LFR) 1, LFR2, LFR3, and LFR4, and wherein the HFR1, HFR2, HFR3, and HFR4 comprises an amino acid sequence with at least 80% sequence identity to an HFR1, HFR2, HFR3, and HFR4, respectively, of an antibody clone of Table 1, and the LFR1, LFR2, LFR3, and LFR4 may comprise an amino acid sequence with at least 80% sequence identity to the LFR1, LFR2, LFR3, and LFR4, respectively, of the same antibody clone of Table 1. The antibody or antigen binding fragment may comprise a heavy chain framework region (HFR) 1, HFR2, HFR3, and HFR4 and light chain framework region (LFR) 1, LFR2, LFR3, and LFR4, and wherein the HFR1, HFR2, HFR3, and HFR4 may comprise an amino acid sequence having or having at least 60, 61, 62, 63, 64, 65, 66, 67, 68, 69, 70, 71, 72, 73, 74, 75, 76, 77, 78, 79, 80, 81, 82, 83, 84, 85, 86, 87, 88, 89, 90, 91, 92, 93, 94, 95, 96, 97, 98, 99, or 100% (or any derivable range therein) sequence identity to an HFR1, HFR2, HFR3, and HFR4, respectively, of an antibody clone of Table 1, and the LFR1, LFR2, LFR3, and LFR4 may comprise an amino acid sequence having or having at least 60, 61, 62, 63, 64, 65, 66, 67, 68, 69, 70, 71, 72, 73, 74, 75, 76, 77, 78, 79, 80, 81, 82, 83, 84, 85, 86, 87, 88, 89, 90, 91, 92, 93, 94, 95, 96, 97, 98, 99, or 100% (or any derivable range therein) sequence identity to the LFR1, LFR2, LFR3, and LFR4, respectively, of the same antibody clone of Table 1. The HFR1, HFR2, HFR3, and HFR4 may comprise the amino acid sequence of an HFR1, HFR2, HFR3, and HFR4, respectively, of an antibody clone of Table 1, and the LFR1, LFR2, LFR3, and LFR4 may comprise the amino acid sequence of the LFR1, LFR2, LFR3, and LFR4, respectively, of the same antibody clone of Table 1. The antibody or antigen binding fragment may comprise a heavy chain and a light chain and wherein the heavy chain may comprise an amino acid sequence with at least 70% sequence identity to a heavy chain of an antibody clone of Table 1 and the light chain may comprise an amino acid sequence with at least 70% sequence identity to the light chain of the same antibody clone of Table 1. The antibody or antigen binding fragment may comprise a heavy chain and a light chain and wherein the heavy chain may comprise an amino acid sequence having or having at least 60, 61, 62, 63, 64, 65, 66, 67, 68, 69, 70, 71, 72, 73, 74, 75, 76, 77, 78, 79, 80, 81, 82, 83, 84, 85, 86, 87, 88, 89, 90, 91, 92, 93, 94, 95, 96, 97, 98, 99, or 100% (or any derivable range therein) sequence identity to a heavy chain of an antibody clone of Table 1 and the light chain may comprise an amino acid sequence having or having at least 60, 61, 62, 63, 64, 65, 66, 67, 68, 69, 70, 71, 72, 73, 74, 75, 76, 77, 78, 79, 80, 81, 82, 83, 84, 85, 86, 87, 88, 89, 90, 91, 92, 93, 94, 95, 96, 97, 98, 99, or 100% (or any derivable range therein) sequence identity to the light chain of the same antibody clone of Table 1. The antibody or antigen binding fragment may comprise a heavy chain and a light chain and wherein the heavy chain may comprise the amino acid sequence of an antibody clone of Table 1 and the light chain may comprise the amino acid sequence of the same antibody clone of Table 1.

[0023] The antibody or antigen binding fragment of the disclosure may be human, chimeric, or humanized. The antibody, or antigen binding fragment may bind a SARS-CoV-2 Spike, NP protein, or ORF8 with a K_{D} of about 10⁻⁶ nM to about 10⁻¹² pM. The antibody, or antigen binding fragment may bind a SARS-CoV-2 Spike, NP protein, or ORF8 with a K_{D} of about, a K_{D} of at least, or a K_{D} of at most 10⁻³, 10⁻⁴, 10⁻⁵, 10⁻⁶, 10⁻⁷, 10⁻⁸, 10⁻⁹, 10⁻¹⁰, 10⁻¹¹, 10⁻¹², 10⁻¹³, 10⁻¹⁴, 10⁻¹⁵, 10⁻¹⁶, 10⁻¹⁷, or 10⁻¹⁸ (or any derivable range therein) μM, nM, or pM. The antibody or antigen binding fragment may specifically bind to a receptor-binding domain (RBD) of the SARS-CoV-2 spike protein. The antibody may be further defined as a neutralizing antibody. The antibody or antigen binding fragment may be further defined as a human antibody or antigen binding fragment, humanized antibody or antigen binding fragment, recombinant antibody or antigen binding fragment, chimeric antibody or antigen binding fragment, an antibody or antigen binding fragment derivative, a veneered antibody or antigen binding fragment, a diabody, a monoclonal antibody or antigen binding fragment, a single domain antibody, or a single chain antibody. The antigen binding fragment may be further defined as a single chain variable fragment (scFv), F(ab′)₂, Fab′, Fab, Fv, or rIgG. The antibody, antigen binding fragment, or polypeptide may be operatively linked to a detectable label. Detectable labels are described herein.

[0024] Also provided are multi-specific and/or multivalent antibodies and polypeptides. The disclosure provides for bivalent or bispecific antibodies that comprise two antigen binding fragments, wherein the antigen binding fragment is two of the same antigen binding fragments or two different antigen binding fragments described herein. The disclosure also provides for multi-specific polypeptides. The polypeptides may comprise at least 2, 3, 4, 5, or 6 antigen binding fragments.

[0025] The antigen binding fragment may be at least 2, 3, 4, 5, or 6 scFv, F(ab′)2, Fab′, Fab, Fv, or rIgG, or combinations thereof. The polypeptide and/or antigen binding fragments of the disclosure may comprise a linker between a heavy chain and light chain variable region or between antigen binding fragments. The linker may be a flexible linker. Exemplary flexible linkers include glycine polymers (G) n, glycine-serine polymers (including, for example, (GS)n, (GSGGS-SEQ ID NO: 1875)n, (G₄S)n and (GGGS-SEQ ID NO:1876) n, where n is an integer of at least one. n may be at least, at most, or exactly 1, 2, 3, 4, 5, 6, 7, 8, 9, or 10 (or any derivable range therein). Glycine-alanine polymers, alanine-serine polymers, and other flexible linkers known in the art and may be used as a linker in the polypeptides of the disclosure. Exemplary linkers can comprise or consist of GGSG (SEQ ID NO:1877), GGSGG (SEQ ID NO:1878), GSGSG (SEQ ID NO:1879), GSGGG (SEQ ID NO:1880), GGGSG (SEQ ID NO:1881), GSSSG (SEQ ID NO:1882), and the like.

[0026] The coronavirus infection may be a SARS-CoV-2 infection. The coronavirus infection may be a SARS-CoV infection. The coronavirus infection may be a MERS-CoV infection. The coronavirus infection may be a HCoV-OC43, HCoV-HKU1, HCOV-229E, or HCoV-NL63 infection.

[0027] Compositions of the disclosure, such as pharmaceutical compositions may comprise a pharmaceutical excipient, carrier, or molecule described herein. The composition may further comprises an adjuvant or an immunostimulator. Such adjuvants or immunostimulators may include, but are not limited to stimulators of pattern recognition receptors, such as Toll-like receptors, RIG-1 and NOD-like receptors (NLR), mineral salts, such as alum, alum combined with monphosphoryl lipid (MPL) A of Enterobacteria, such as Escherihia coli, Salmonella minnesota, Salmonella typhimurium, or Shigella flexneri or specifically with MPL (ASO4), MPL A of above-mentioned bacteria separately, saponins, such as QS-21, Quil-A, ISCOMs, ISCOMATRIX, emulsions such as MF59, Montanide, ISA 51 and ISA 720, AS02 (QS21+squalene+MPL), liposomes and liposomal formulations such as AS01, synthesized or specifically prepared microparticles and microcarriers such as bacteria-derived outer membrane vesicles (OMV) of N. gonorrheae, Chlamydia trachomatis and others, or chitosan particles, depot-forming agents, such as Pluronic block co-polymers, specifically modified or prepared peptides, such as muramyl dipeptide, aminoalkyl glucosaminide 4-phosphates, such as RC529, or proteins, such as bacterial toxoids or toxin fragments. Compositions may comprise more than one antibody and/or antigen binding fragment of the disclosure. Accordingly, compositions of the disclosure may comprise, may comprise at least, or may comprise at most 1, 2, 3, 4, 5, 6, 7, 8, 9, or 10 antibodies and/or antigen binding fragments of the disclosure, wherein each antibody or antigen binding fragment is independently selected from an antibody or antigen binding fragment of the disclosure, such as those shown in Table 1. The compositions of the disclosure may be formulated for a route of administration described herein. The composition, antibody, antigen binding fragment, or polypeptide may be formulated for parenteral, intravenous, subcutaneous, intramuscular, or intranasal administration. The compositions may be formulated for intranasal administration.

[0028] The polypeptides, compositions, antibodies, antigen binding fragments, nucleic acids, or host cells, when administered to a subject, may be provided or may be provided at least, or may be provided at most 1, 2, 3, 4, 5, 6, 7, 8, 9, 10, 11, 12, 13, 14, 15, 16, 17, 18, 19, or 20 times (or any derivable range therein) over the course of, over the course of at least, or over the course of at most 1, 2, 3, 4, 5, 6, 7, 8, 9, 10, 11, 12, 13, or 14 days or 1, 2, 3, 4, 5, 6, 7, 8 9, 10, 11, 12, 13, 14, 15, 16, 17, 18, 19, or 20 weeks, or 1, 2, 3, 4, 5, 6, 7, 8, 9, 10, 11, or 12 months, or 1, 2, 3, 4, 5, 6, 7, 8, 9, or 10 years (or any range derivable therein).

[0029] The host cell may be a human cell, B cell, T cell, Chinese hamster ovary, NS0 murine myeloma cell, or PER.C6 cell. The host cell may be a cell type or cell population described herein.

[0030] The subject or patient may be a human subject or a human patient. The subject or patient may be a non-human animal. The non-human animal may be a bat, monkey, camel, rat, mouse, rabbit, goat, chicken, bird, cat, or dog. The subject may further be defined as an at-risk subject. At-risk subjects include health care workers, immunocompromised subjects, people over the age of 65, or those with at least one or at least two underlying conditions. Example of underlying conditions include obesity, high blood pressure, autoimmunity, cancer, and asthma. The subject may be one that has one or more symptoms of a coronavirus infection. Symptoms of a coronavirus infection include, but are not limited to elevated temperature or a fever of 100.0° F. or more, loss of taste or smell, cough, difficulty breathing, shortness of breath, fatigue, headache, chills, sore throat, congestion or runny nose, shaking or exaggerated shivering, significant muscle pain or ache, diarrhea, and/or nausea or vomiting. The subject may be one that does not have any symptoms of a coronavirus infection. The subject may be one that has been diagnosed with a coronavirus infection. The subject may be one that has not been diagnosed with a coronavirus infection. The subject may be one that has been previously treated for a coronavirus infection. The subject may be one that has been previously vaccinated for coronavirus. The subject may be one that has not been previously vaccinated for coronavirus. The previous treatment may comprise a pain reliever, such as acetaminophen or ibuprofen, a steroid such as dexamethasone, prednisolone, beclomethasone, fluticasone, or methylprednisone or an antiviral such as remdesivir. The subject may be administered an additional therapeutic. The additional therapeutic may comprise one or more of a pain reliever, such as acetaminophen or ibuprofen, a steroid such as dexamethasone, prednisolone, beclomethasone, fluticasone, or methylprednisone or an antiviral such as remdesivir. The additional therapeutic may comprise dexamethasone. The additional therapeutic may comprise remdesivir.

[0031] The method may comprise or further comprise incubating the antibody, antigen binding fragment, or polypeptide under conditions that allow for the binding of the antibody, antigen binding fragment, or polypeptide to antigens in the biological sample or extract thereof. The method may comprise or further comprise detecting the binding of an antigen to the antibody, antigen binding fragment, or polypeptide. The method may comprise or further comprise contacting the biological sample with at least one capture antibody, antigen, or polypeptide. The at least one capture antibody, antigen binding fragment, or polypeptide may be an antibody, polypeptide, or antigen binding fragment of the disclosure. The capture antibody may be linked or operatively linked to a solid support. The term “operatively linked” refers to a situation where two components are combined or capable of combining to form a complex. For example, the components may be covalently attached and/or on the same polypeptide, such as in a fusion protein or the components may have a certain degree of binding affinity for each other, such as a binding affinity that occurs through van der Waals forces. The biological sample may comprise a blood sample, urine sample, fecal sample, or nasopharyngeal sample. The at least one antibody, antigen binding fragment, or polypeptide may be operatively linked to a detectable label. The method may comprise or further comprise incubating the antibody, antigen binding fragment, or polypeptide under conditions that allow for the binding of the antibody, antigen binding fragment, or polypeptide to antigens in the biological sample or extract thereof. The method may comprise or further comprise detecting the binding of an antigen to the antibody, antigen binding fragment, or polypeptide. The method may comprise or further comprise contacting the biological sample with at least one capture antibody, antigen, or polypeptide. The biological sample may comprise a blood sample, urine sample, fecal sample, or nasopharyngeal sample.

[0032] The disclosure describes an antibody, antigen binding fragment, or polypeptide comprising a heavy chain variable region having a HCDR1, HCDR2, and HCDR3, and a light chain variable region having a LCDR1, LCDR2, and LCDR3, wherein the HCDR1, HCDR2, and HCDR3 comprises an amino acid sequence of SEQ ID NOS: 3, 4, and 5, respectively and the LCDR1, LCDR2, and LCDR3 comprises an amino acid sequence of SEQ ID NOS: 12, 13, and 14, respectively.

[0033] The disclosure describes an antibody, antigen binding fragment, or polypeptide comprising a heavy chain variable region having a HCDR1, HCDR2, and HCDR3, and a light chain variable region having a LCDR1, LCDR2, and LCDR3, wherein the HCDR1, HCDR2, and HCDR3 comprises an amino acid sequence of SEQ ID NOS: 21, 22, and 23, respectively and the LCDR1, LCDR2, and LCDR3 comprises an amino acid sequence of SEQ ID NOS: 29, 30, and 31, respectively.

[0034] The disclosure describes an antibody, antigen binding fragment, or polypeptide comprising a heavy chain variable region having a HCDR1, HCDR2, and HCDR3, and a light chain variable region having a LCDR1, LCDR2, and LCDR3, wherein the HCDR1, HCDR2, and HCDR3 comprises an amino acid sequence of SEQ ID NOS: 38, 39, and 40, respectively and the LCDR1, LCDR2, and LCDR3 comprises an amino acid sequence of SEQ ID NOS: 47, 48, and 49, respectively.

[0035] The disclosure describes an antibody, antigen binding fragment, or polypeptide comprising a heavy chain variable region having a HCDR1, HCDR2, and HCDR3, and a light chain variable region having a LCDR1, LCDR2, and LCDR3, wherein the HCDR1, HCDR2, and HCDR3 comprises an amino acid sequence of SEQ ID NOS: 56, 57, and 58, respectively and the LCDR1, LCDR2, and LCDR3 comprises an amino acid sequence of SEQ ID NOS: 63, 64, and 65, respectively.

[0036] The disclosure describes an antibody, antigen binding fragment, or polypeptide comprising a heavy chain variable region having a HCDR1, HCDR2, and HCDR3, and a light chain variable region having a LCDR1, LCDR2, and LCDR3, wherein the HCDR1, HCDR2, and HCDR3 comprises an amino acid sequence of SEQ ID NOS: 72, 73, and 74, respectively and the LCDR1, LCDR2, and LCDR3 comprises an amino acid sequence of SEQ ID NOS: 79, 80, and 81, respectively.

[0037] The disclosure describes an antibody, antigen binding fragment, or polypeptide comprising a heavy chain variable region having a HCDR1, HCDR2, and HCDR3, and a light chain variable region having a LCDR1, LCDR2, and LCDR3, wherein the HCDR1, HCDR2, and HCDR3 comprises an amino acid sequence of SEQ ID NOS: 3, 88, and 89, respectively and the LCDR1, LCDR2, and LCDR3 comprises an amino acid sequence of SEQ ID NOS: 63, 94, and 95, respectively.

[0038] The disclosure describes an antibody, antigen binding fragment, or polypeptide comprising a heavy chain variable region having a HCDR1, HCDR2, and HCDR3, and a light chain variable region having a LCDR1, LCDR2, and LCDR3, wherein the HCDR1, HCDR2, and HCDR3 comprises an amino acid sequence of SEQ ID NOS: 100, 101, and 102, respectively and the LCDR1, LCDR2, and LCDR3 comprises an amino acid sequence of SEQ ID NOS: 63, 64, and 65, respectively.

[0039] The disclosure describes an antibody, antigen binding fragment, or polypeptide comprising a heavy chain variable region having a HCDR1, HCDR2, and HCDR3, and a light HCDR3 comprises an amino acid sequence of SEQ ID NOS: 56, 111, and 112, respectively and the LCDR1, LCDR2, and LCDR3 comprises an amino acid sequence of SEQ ID NOS: 118, 119, and 120, respectively.

[0040] The disclosure describes an antibody, antigen binding fragment, or polypeptide comprising a heavy chain variable region having a HCDR1, HCDR2, and HCDR3, and a light chain variable region having a LCDR1, LCDR2, and LCDR3, wherein the HCDR1, HCDR2, and HCDR3 comprises an amino acid sequence of SEQ ID NOS: 126, 127, and 128, respectively and the LCDR1, LCDR2, and LCDR3 comprises an amino acid sequence of SEQ ID NOS: 134, 135, and 136, respectively.

[0041] The disclosure describes an antibody, antigen binding fragment, or polypeptide comprising a heavy chain variable region having a HCDR1, HCDR2, and HCDR3, and a light chain variable region having a LCDR1, LCDR2, and LCDR3, wherein the HCDR1, HCDR2, and HCDR3 comprises an amino acid sequence of SEQ ID NOS: 141, 142, and 143, respectively and the LCDR1, LCDR2, and LCDR3 comprises an amino acid sequence of SEQ ID NOS: 150, 151, and 152, respectively.

[0042] The disclosure describes an antibody, antigen binding fragment, or polypeptide comprising a heavy chain variable region having a HCDR1, HCDR2, and HCDR3, and a light chain variable region having a LCDR1, LCDR2, and LCDR3, wherein the HCDR1, HCDR2, and HCDR3 comprises an amino acid sequence of SEQ ID NOS: 156, 157, and 158, respectively and the LCDR1, LCDR2, and LCDR3 comprises an amino acid sequence of SEQ ID NOS: 63, 164, and 165, respectively.

[0043] The disclosure describes an antibody, antigen binding fragment, or polypeptide comprising a heavy chain variable region having a HCDR1, HCDR2, and HCDR3, and a light chain variable region having a LCDR1, LCDR2, and LCDR3, wherein the HCDR1, HCDR2, and HCDR3 comprises an amino acid sequence of SEQ ID NOS: 170, 171, and 172, respectively and the LCDR1, LCDR2, and LCDR3 comprises an amino acid sequence of SEQ ID NOS: 178, 179, and 180, respectively.

[0044] The disclosure describes an antibody, antigen binding fragment, or polypeptide comprising a heavy chain variable region having a HCDR1, HCDR2, and HCDR3, and a light HCDR3 comprises an amino acid sequence of SEQ ID NOS: 187, 188, and 189, respectively and the LCDR1, LCDR2, and LCDR3 comprises an amino acid sequence of SEQ ID NOS: 194, 135, and 195, respectively.

[0045] The disclosure describes an antibody, antigen binding fragment, or polypeptide comprising a heavy chain variable region having a HCDR1, HCDR2, and HCDR3, and a light chain variable region having a LCDR1, LCDR2, and LCDR3, wherein the HCDR1, HCDR2, and HCDR3 comprises an amino acid sequence of SEQ ID NOS: 199, 200, and 201, respectively and the LCDR1, LCDR2, and LCDR3 comprises an amino acid sequence of SEQ ID NOS: 207, 208, and 209, respectively.

[0046] The disclosure describes an antibody, antigen binding fragment, or polypeptide comprising a heavy chain variable region having a HCDR1, HCDR2, and HCDR3, and a light chain variable region having a LCDR1, LCDR2, and LCDR3, wherein the HCDR1, HCDR2, and HCDR3 comprises an amino acid sequence of SEQ ID NOS: 214, 215, and 216, respectively and the LCDR1, LCDR2, and LCDR3 comprises an amino acid sequence of SEQ ID NOS: 223, 224, and 225, respectively.

[0047] The disclosure describes an antibody, antigen binding fragment, or polypeptide comprising a heavy chain variable region having a HCDR1, HCDR2, and HCDR3, and a light chain variable region having a LCDR1, LCDR2, and LCDR3, wherein the HCDR1, HCDR2, and HCDR3 comprises an amino acid sequence of SEQ ID NOS: 231, 232, and 233, respectively and the LCDR1, LCDR2, and LCDR3 comprises an amino acid sequence of SEQ ID NOS: 237, 135, and 238, respectively.

[0048] The disclosure describes an antibody, antigen binding fragment, or polypeptide comprising a heavy chain variable region having a HCDR1, HCDR2, and HCDR3, and a light chain variable region having a LCDR1, LCDR2, and LCDR3, wherein the HCDR1, HCDR2, and HCDR3 comprises an amino acid sequence of SEQ ID NOS: 242, 243, and 244, respectively and the LCDR1, LCDR2, and LCDR3 comprises an amino acid sequence of SEQ ID NOS: 248, 249, and 250, respectively.

[0049] The disclosure describes an antibody, antigen binding fragment, or polypeptide comprising a heavy chain variable region having a HCDR1, HCDR2, and HCDR3, and a light HCDR3 comprises an amino acid sequence of SEQ ID NOS: 199, 256, and 257, respectively and the LCDR1, LCDR2, and LCDR3 comprises an amino acid sequence of SEQ ID NOS: 262, 263, and 264, respectively.

[0050] The disclosure describes an antibody, antigen binding fragment, or polypeptide comprising a heavy chain variable region having a HCDR1, HCDR2, and HCDR3, and a light chain variable region having a LCDR1, LCDR2, and LCDR3, wherein the HCDR1, HCDR2, and HCDR3 comprises an amino acid sequence of SEQ ID NOS: 270, 271, and 272, respectively and the LCDR1, LCDR2, and LCDR3 comprises an amino acid sequence of SEQ ID NOS: 276, 277, and 278, respectively.

[0051] The disclosure describes an antibody, antigen binding fragment, or polypeptide comprising a heavy chain variable region having a HCDR1, HCDR2, and HCDR3, and a light chain variable region having a LCDR1, LCDR2, and LCDR3, wherein the HCDR1, HCDR2, and HCDR3 comprises an amino acid sequence of SEQ ID NOS: 284, 285, and 286, respectively and the LCDR1, LCDR2, and LCDR3 comprises an amino acid sequence of SEQ ID NOS: 291, 30, and 292, respectively.

[0052] The disclosure describes an antibody, antigen binding fragment, or polypeptide comprising a heavy chain variable region having a HCDR1, HCDR2, and HCDR3, and a light chain variable region having a LCDR1, LCDR2, and LCDR3, wherein the HCDR1, HCDR2, and HCDR3 comprises an amino acid sequence of SEQ ID NOS: 296, 297, and 298, respectively and the LCDR1, LCDR2, and LCDR3 comprises an amino acid sequence of SEQ ID NOS: 302, 135, and 303, respectively.

[0053] The disclosure describes an antibody, antigen binding fragment, or polypeptide comprising a heavy chain variable region having a HCDR1, HCDR2, and HCDR3, and a light chain variable region having a LCDR1, LCDR2, and LCDR3, wherein the HCDR1, HCDR2, and HCDR3 comprises an amino acid sequence of SEQ ID NOS: 308, 157, and 309, respectively and the LCDR1, LCDR2, and LCDR3 comprises an amino acid sequence of SEQ ID NOS: 313, 314, and 315, respectively.

[0054] The disclosure describes an antibody, antigen binding fragment, or polypeptide comprising a heavy chain variable region having a HCDR1, HCDR2, and HCDR3, and a light HCDR3 comprises an amino acid sequence of SEQ ID NOS: 321, 322, and 323, respectively and the LCDR1, LCDR2, and LCDR3 comprises an amino acid sequence of SEQ ID NOS: 328, 249, and 329, respectively.

[0055] The disclosure describes an antibody, antigen binding fragment, or polypeptide comprising a heavy chain variable region having a HCDR1, HCDR2, and HCDR3, and a light chain variable region having a LCDR1, LCDR2, and LCDR3, wherein the HCDR1, HCDR2, and HCDR3 comprises an amino acid sequence of SEQ ID NOS: 56, 333, and 334, respectively and the LCDR1, LCDR2, and LCDR3 comprises an amino acid sequence of SEQ ID NOS: 338, 135, and 303, respectively.

[0056] The disclosure describes an antibody, antigen binding fragment, or polypeptide comprising a heavy chain variable region having a HCDR1, HCDR2, and HCDR3, and a light chain variable region having a LCDR1, LCDR2, and LCDR3, wherein the HCDR1, HCDR2, and HCDR3 comprises an amino acid sequence of SEQ ID NOS: 342, 343, and 344, respectively and the LCDR1, LCDR2, and LCDR3 comprises an amino acid sequence of SEQ ID NOS: 349, 350, and 351, respectively.

[0057] The disclosure describes an antibody, antigen binding fragment, or polypeptide comprising a heavy chain variable region having a HCDR1, HCDR2, and HCDR3, and a light chain variable region having a LCDR1, LCDR2, and LCDR3, wherein the HCDR1, HCDR2, and HCDR3 comprises an amino acid sequence of SEQ ID NOS: 358, 359, and 360, respectively and the LCDR1, LCDR2, and LCDR3 comprises an amino acid sequence of SEQ ID NOS: 365, 366, and 367, respectively.

[0058] The disclosure describes an antibody, antigen binding fragment, or polypeptide comprising a heavy chain variable region having a HCDR1, HCDR2, and HCDR3, and a light chain variable region having a LCDR1, LCDR2, and LCDR3, wherein the HCDR1, HCDR2, and HCDR3 comprises an amino acid sequence of SEQ ID NOS: 358, 373, and 374, respectively and the LCDR1, LCDR2, and LCDR3 comprises an amino acid sequence of SEQ ID NOS: 338, 135, and 378, respectively.

[0059] The disclosure describes an antibody, antigen binding fragment, or polypeptide comprising a heavy chain variable region having a HCDR1, HCDR2, and HCDR3, and a light HCDR3 comprises an amino acid sequence of SEQ ID NOS: 242, 243, and 383, respectively and the LCDR1, LCDR2, and LCDR3 comprises an amino acid sequence of SEQ ID NOS: 386, 387, and 388, respectively.

[0060] The disclosure describes an antibody, antigen binding fragment, or polypeptide comprising a heavy chain variable region having a HCDR1, HCDR2, and HCDR3, and a light chain variable region having a LCDR1, LCDR2, and LCDR3, wherein the HCDR1, HCDR2, and HCDR3 comprises an amino acid sequence of SEQ ID NOS: 358, 392, and 393, respectively and the LCDR1, LCDR2, and LCDR3 comprises an amino acid sequence of SEQ ID NOS: 276, 396, and 397, respectively.

[0061] The disclosure describes an antibody, antigen binding fragment, or polypeptide comprising a heavy chain variable region having a HCDR1, HCDR2, and HCDR3, and a light chain variable region having a LCDR1, LCDR2, and LCDR3, wherein the HCDR1, HCDR2, and HCDR3 comprises an amino acid sequence of SEQ ID NOS: 56, 4, and 400, respectively and the LCDR1, LCDR2, and LCDR3 comprises an amino acid sequence of SEQ ID NOS: 403, 404, and 405, respectively.

[0062] The disclosure describes an antibody, antigen binding fragment, or polypeptide comprising a heavy chain variable region having a HCDR1, HCDR2, and HCDR3, and a light chain variable region having a LCDR1, LCDR2, and LCDR3, wherein the HCDR1, HCDR2, and HCDR3 comprises an amino acid sequence of SEQ ID NOS: 126, 409, and 410, respectively and the LCDR1, LCDR2, and LCDR3 comprises an amino acid sequence of SEQ ID NOS: 414, 13, and 415, respectively.

[0063] The disclosure describes an antibody, antigen binding fragment, or polypeptide comprising a heavy chain variable region having a HCDR1, HCDR2, and HCDR3, and a light chain variable region having a LCDR1, LCDR2, and LCDR3, wherein the HCDR1, HCDR2, and HCDR3 comprises an amino acid sequence of SEQ ID NOS: 199, 419, and 420, respectively and the LCDR1, LCDR2, and LCDR3 comprises an amino acid sequence of SEQ ID NOS: 207, 208, and 424, respectively.

[0064] The disclosure describes an antibody, antigen binding fragment, or polypeptide comprising a heavy chain variable region having a HCDR1, HCDR2, and HCDR3, and a light HCDR3 comprises an amino acid sequence of SEQ ID NOS: 56, 427, and 428, respectively and the LCDR1, LCDR2, and LCDR3 comprises an amino acid sequence of SEQ ID NOS: 432, 249, and 433, respectively.

[0065] The disclosure describes an antibody, antigen binding fragment, or polypeptide comprising a heavy chain variable region having a HCDR1, HCDR2, and HCDR3, and a light chain variable region having a LCDR1, LCDR2, and LCDR3, wherein the HCDR1, HCDR2, and HCDR3 comprises an amino acid sequence of SEQ ID NOS: 437, 142, and 438, respectively and the LCDR1, LCDR2, and LCDR3 comprises an amino acid sequence of SEQ ID NOS: 178, 441, and 442, respectively.

[0066] The disclosure describes an antibody, antigen binding fragment, or polypeptide comprising a heavy chain variable region having a HCDR1, HCDR2, and HCDR3, and a light chain variable region having a LCDR1, LCDR2, and LCDR3, wherein the HCDR1, HCDR2, and HCDR3 comprises an amino acid sequence of SEQ ID NOS: 446, 447, and 448, respectively and the LCDR1, LCDR2, and LCDR3 comprises an amino acid sequence of SEQ ID NOS: 386, 387, and 452, respectively.

[0067] The disclosure describes an antibody, antigen binding fragment, or polypeptide comprising a heavy chain variable region having a HCDR1, HCDR2, and HCDR3, and a light chain variable region having a LCDR1, LCDR2, and LCDR3, wherein the HCDR1, HCDR2, and HCDR3 comprises an amino acid sequence of SEQ ID NOS: 457, 458, and 459, respectively and the LCDR1, LCDR2, and LCDR3 comprises an amino acid sequence of SEQ ID NOS: 464, 465, and 466, respectively.

[0068] The disclosure describes an antibody, antigen binding fragment, or polypeptide comprising a heavy chain variable region having a HCDR1, HCDR2, and HCDR3, and a light chain variable region having a LCDR1, LCDR2, and LCDR3, wherein the HCDR1, HCDR2, and HCDR3 comprises an amino acid sequence of SEQ ID NOS: 472, 473, and 474, respectively and the LCDR1, LCDR2, and LCDR3 comprises an amino acid sequence of SEQ ID NOS: 63, 64, and 480, respectively.

[0069] The disclosure describes an antibody, antigen binding fragment, or polypeptide comprising a heavy chain variable region having a HCDR1, HCDR2, and HCDR3, and a light HCDR3 comprises an amino acid sequence of SEQ ID NOS: 56, 483, and 484, respectively and the LCDR1, LCDR2, and LCDR3 comprises an amino acid sequence of SEQ ID NOS: 489, 490, and 491, respectively.

[0070] The disclosure describes an antibody, antigen binding fragment, or polypeptide comprising a heavy chain variable region having a HCDR1, HCDR2, and HCDR3, and a light chain variable region having a LCDR1, LCDR2, and LCDR3, wherein the HCDR1, HCDR2, and HCDR3 comprises an amino acid sequence of SEQ ID NOS: 141, 497, and 498, respectively and the LCDR1, LCDR2, and LCDR3 comprises an amino acid sequence of SEQ ID NOS: 502, 503, and 504, respectively.

[0071] The disclosure describes an antibody, antigen binding fragment, or polypeptide comprising a heavy chain variable region having a HCDR1, HCDR2, and HCDR3, and a light chain variable region having a LCDR1, LCDR2, and LCDR3, wherein the HCDR1, HCDR2, and HCDR3 comprises an amino acid sequence of SEQ ID NOS: 141, 142, and 507, respectively and the LCDR1, LCDR2, and LCDR3 comprises an amino acid sequence of SEQ ID NOS: 502, 503, and 510, respectively.

[0072] The disclosure describes an antibody, antigen binding fragment, or polypeptide comprising a heavy chain variable region having a HCDR1, HCDR2, and HCDR3, and a light chain variable region having a LCDR1, LCDR2, and LCDR3, wherein the HCDR1, HCDR2, and HCDR3 comprises an amino acid sequence of SEQ ID NOS: 513, 514, and 515, respectively and the LCDR1, LCDR2, and LCDR3 comprises an amino acid sequence of SEQ ID NOS: 520, 521, and 522, respectively.

[0073] The disclosure describes an antibody, antigen binding fragment, or polypeptide comprising a heavy chain variable region having a HCDR1, HCDR2, and HCDR3, and a light chain variable region having a LCDR1, LCDR2, and LCDR3, wherein the HCDR1, HCDR2, and HCDR3 comprises an amino acid sequence of SEQ ID NOS: 527, 528, and 529, respectively and the LCDR1, LCDR2, and LCDR3 comprises an amino acid sequence of SEQ ID NOS: 535, 350, and 536, respectively.

[0074] The disclosure describes an antibody, antigen binding fragment, or polypeptide comprising a heavy chain variable region having a HCDR1, HCDR2, and HCDR3, and a light HCDR3 comprises an amino acid sequence of SEQ ID NOS: 542, 543, and 544, respectively and the LCDR1, LCDR2, and LCDR3 comprises an amino acid sequence of SEQ ID NOS: 548, 387, and 549, respectively.

[0075] The disclosure describes an antibody, antigen binding fragment, or polypeptide comprising a heavy chain variable region having a HCDR1, HCDR2, and HCDR3, and a light chain variable region having a LCDR1, LCDR2, and LCDR3, wherein the HCDR1, HCDR2, and HCDR3 comprises an amino acid sequence of SEQ ID NOS: 141, 553, and 554, respectively and the LCDR1, LCDR2, and LCDR3 comprises an amino acid sequence of SEQ ID NOS: 262, 263, and 560, respectively.

[0076] The disclosure describes an antibody, antigen binding fragment, or polypeptide comprising a heavy chain variable region having a HCDR1, HCDR2, and HCDR3, and a light chain variable region having a LCDR1, LCDR2, and LCDR3, wherein the HCDR1, HCDR2, and HCDR3 comprises an amino acid sequence of SEQ ID NOS: 563, 564, and 565, respectively and the LCDR1, LCDR2, and LCDR3 comprises an amino acid sequence of SEQ ID NOS: 570, 249, and 571, respectively.

[0077] The disclosure describes an antibody, antigen binding fragment, or polypeptide comprising a heavy chain variable region having a HCDR1, HCDR2, and HCDR3, and a light chain variable region having a LCDR1, LCDR2, and LCDR3, wherein the HCDR1, HCDR2, and HCDR3 comprises an amino acid sequence of SEQ ID NOS: 187, 576, and 577, respectively and the LCDR1, LCDR2, and LCDR3 comprises an amino acid sequence of SEQ ID NOS: 403, 404, and 581, respectively.

[0078] The disclosure describes an antibody, antigen binding fragment, or polypeptide comprising a heavy chain variable region having a HCDR1, HCDR2, and HCDR3, and a light chain variable region having a LCDR1, LCDR2, and LCDR3, wherein the HCDR1, HCDR2, and HCDR3 comprises an amino acid sequence of SEQ ID NOS: 187, 585, and 586, respectively and the LCDR1, LCDR2, and LCDR3 comprises an amino acid sequence of SEQ ID NOS: 591, 592, and 593, respectively.

[0079] The disclosure describes an antibody, antigen binding fragment, or polypeptide comprising a heavy chain variable region having a HCDR1, HCDR2, and HCDR3, and a light HCDR3 comprises an amino acid sequence of SEQ ID NOS: 599, 600, and 601, respectively and the LCDR1, LCDR2, and LCDR3 comprises an amino acid sequence of SEQ ID NOS: 605, 135, and 606, respectively.

[0080] The disclosure describes an antibody, antigen binding fragment, or polypeptide comprising a heavy chain variable region having a HCDR1, HCDR2, and HCDR3, and a light chain variable region having a LCDR1, LCDR2, and LCDR3, wherein the HCDR1, HCDR2, and HCDR3 comprises an amino acid sequence of SEQ ID NOS: 610, 611, and 612, respectively and the LCDR1, LCDR2, and LCDR3 comprises an amino acid sequence of SEQ ID NOS: 248, 249, and 617, respectively.

[0081] The disclosure describes an antibody, antigen binding fragment, or polypeptide comprising a heavy chain variable region having a HCDR1, HCDR2, and HCDR3, and a light chain variable region having a LCDR1, LCDR2, and LCDR3, wherein the HCDR1, HCDR2, and HCDR3 comprises an amino acid sequence of SEQ ID NOS: 622, 623, and 624, respectively and the LCDR1, LCDR2, and LCDR3 comprises an amino acid sequence of SEQ ID NOS: 630, 631, and 632, respectively.

[0082] The disclosure describes an antibody, antigen binding fragment, or polypeptide comprising a heavy chain variable region having a HCDR1, HCDR2, and HCDR3, and a light chain variable region having a LCDR1, LCDR2, and LCDR3, wherein the HCDR1, HCDR2, and HCDR3 comprises an amino acid sequence of SEQ ID NOS: 638, 639, and 640, respectively and the LCDR1, LCDR2, and LCDR3 comprises an amino acid sequence of SEQ ID NOS: 645, 387, and 646, respectively.

[0083] The disclosure describes an antibody, antigen binding fragment, or polypeptide comprising a heavy chain variable region having a HCDR1, HCDR2, and HCDR3, and a light chain variable region having a LCDR1, LCDR2, and LCDR3, wherein the HCDR1, HCDR2, and HCDR3 comprises an amino acid sequence of SEQ ID NOS: 650, 88, and 651, respectively and the LCDR1, LCDR2, and LCDR3 comprises an amino acid sequence of SEQ ID NOS: 262, 263, and 654, respectively.

[0084] The disclosure describes an antibody, antigen binding fragment, or polypeptide comprising a heavy chain variable region having a HCDR1, HCDR2, and HCDR3, and a light HCDR3 comprises an amino acid sequence of SEQ ID NOS: 658, 543, and 659, respectively and the LCDR1, LCDR2, and LCDR3 comprises an amino acid sequence of SEQ ID NOS: 520, 387, and 646, respectively.

[0085] The disclosure describes an antibody, antigen binding fragment, or polypeptide comprising a heavy chain variable region having a HCDR1, HCDR2, and HCDR3, and a light chain variable region having a LCDR1, LCDR2, and LCDR3, wherein the HCDR1, HCDR2, and HCDR3 comprises an amino acid sequence of SEQ ID NOS: 187, 585, and 667, respectively and the LCDR1, LCDR2, and LCDR3 comprises an amino acid sequence of SEQ ID NOS: 673, 674, and 675, respectively.

[0086] The disclosure describes an antibody, antigen binding fragment, or polypeptide comprising a heavy chain variable region having a HCDR1, HCDR2, and HCDR3, and a light chain variable region having a LCDR1, LCDR2, and LCDR3, wherein the HCDR1, HCDR2, and HCDR3 comprises an amino acid sequence of SEQ ID NOS: 679, 680, and 681, respectively and the LCDR1, LCDR2, and LCDR3 comprises an amino acid sequence of SEQ ID NOS: 686, 687, and 688, respectively.

[0087] The disclosure describes an antibody, antigen binding fragment, or polypeptide comprising a heavy chain variable region having a HCDR1, HCDR2, and HCDR3, and a light chain variable region having a LCDR1, LCDR2, and LCDR3, wherein the HCDR1, HCDR2, and HCDR3 comprises an amino acid sequence of SEQ ID NOS: 693, 157, and 694, respectively and the LCDR1, LCDR2, and LCDR3 comprises an amino acid sequence of SEQ ID NOS: 520, 698, and 699, respectively.

[0088] The disclosure describes an antibody, antigen binding fragment, or polypeptide comprising a heavy chain variable region having a HCDR1, HCDR2, and HCDR3, and a light chain variable region having a LCDR1, LCDR2, and LCDR3, wherein the HCDR1, HCDR2, and HCDR3 comprises an amino acid sequence of SEQ ID NOS: 242, 243, and 704, respectively and the LCDR1, LCDR2, and LCDR3 comprises an amino acid sequence of SEQ ID NOS: 502, 366, and 708, respectively.

[0089] The disclosure describes an antibody, antigen binding fragment, or polypeptide comprising a heavy chain variable region having a HCDR1, HCDR2, and HCDR3, and a light HCDR3 comprises an amino acid sequence of SEQ ID NOS: 527, 543, and 711, respectively and the LCDR1, LCDR2, and LCDR3 comprises an amino acid sequence of SEQ ID NOS: 673, 716, and 717, respectively.

[0090] The disclosure describes an antibody, antigen binding fragment, or polypeptide comprising a heavy chain variable region having a HCDR1, HCDR2, and HCDR3, and a light chain variable region having a LCDR1, LCDR2, and LCDR3, wherein the HCDR1, HCDR2, and HCDR3 comprises an amino acid sequence of SEQ ID NOS: 187, 724, and 725, respectively and the LCDR1, LCDR2, and LCDR3 comprises an amino acid sequence of SEQ ID NOS: 338, 135, and 728, respectively.

[0091] The disclosure describes an antibody, antigen binding fragment, or polypeptide comprising a heavy chain variable region having a HCDR1, HCDR2, and HCDR3, and a light chain variable region having a LCDR1, LCDR2, and LCDR3, wherein the HCDR1, HCDR2, and HCDR3 comprises an amino acid sequence of SEQ ID NOS: 734, 585, and 735, respectively and the LCDR1, LCDR2, and LCDR3 comprises an amino acid sequence of SEQ ID NOS: 740, 119, and 741, respectively.

[0092] The disclosure describes an antibody, antigen binding fragment, or polypeptide comprising a heavy chain variable region having a HCDR1, HCDR2, and HCDR3, and a light chain variable region having a LCDR1, LCDR2, and LCDR3, wherein the HCDR1, HCDR2, and HCDR3 comprises an amino acid sequence of SEQ ID NOS: 744, 543, and 745, respectively and the LCDR1, LCDR2, and LCDR3 comprises an amino acid sequence of SEQ ID NOS: 520, 387, and 750, respectively.

[0093] The disclosure describes an antibody, antigen binding fragment, or polypeptide comprising a heavy chain variable region having a HCDR1, HCDR2, and HCDR3, and a light chain variable region having a LCDR1, LCDR2, and LCDR3, wherein the HCDR1, HCDR2, and HCDR3 comprises an amino acid sequence of SEQ ID NOS: 754, 755, and 756, respectively and the LCDR1, LCDR2, and LCDR3 comprises an amino acid sequence of SEQ ID NOS: 761, 208, and 762, respectively.

[0094] The disclosure describes an antibody, antigen binding fragment, or polypeptide comprising a heavy chain variable region having a HCDR1, HCDR2, and HCDR3, and a light HCDR3 comprises an amino acid sequence of SEQ ID NOS: 765, 497, and 766, respectively and the LCDR1, LCDR2, and LCDR3 comprises an amino acid sequence of SEQ ID NOS: 769, 770, and 771, respectively.

[0095] The disclosure describes an antibody, antigen binding fragment, or polypeptide comprising a heavy chain variable region having a HCDR1, HCDR2, and HCDR3, and a light chain variable region having a LCDR1, LCDR2, and LCDR3, wherein the HCDR1, HCDR2, and HCDR3 comprises an amino acid sequence of SEQ ID NOS: 775, 776, and 777, respectively and the LCDR1, LCDR2, and LCDR3 comprises an amino acid sequence of SEQ ID NOS: 782, 30, and 783, respectively.

[0096] The disclosure describes an antibody, antigen binding fragment, or polypeptide comprising a heavy chain variable region having a HCDR1, HCDR2, and HCDR3, and a light chain variable region having a LCDR1, LCDR2, and LCDR3, wherein the HCDR1, HCDR2, and HCDR3 comprises an amino acid sequence of SEQ ID NOS: 786, 787, and 788, respectively and the LCDR1, LCDR2, and LCDR3 comprises an amino acid sequence of SEQ ID NOS: 794, 30, and 795, respectively.

[0097] The disclosure describes an antibody, antigen binding fragment, or polypeptide comprising a heavy chain variable region having a HCDR1, HCDR2, and HCDR3, and a light chain variable region having a LCDR1, LCDR2, and LCDR3, wherein the HCDR1, HCDR2, and HCDR3 comprises an amino acid sequence of SEQ ID NOS: 798, 799, and 800, respectively and the LCDR1, LCDR2, and LCDR3 comprises an amino acid sequence of SEQ ID NOS: 804, 30, and 805, respectively.

[0098] The disclosure describes an antibody, antigen binding fragment, or polypeptide comprising a heavy chain variable region having a HCDR1, HCDR2, and HCDR3, and a light chain variable region having a LCDR1, LCDR2, and LCDR3, wherein the HCDR1, HCDR2, and HCDR3 comprises an amino acid sequence of SEQ ID NOS: 693, 809, and 810, respectively and the LCDR1, LCDR2, and LCDR3 comprises an amino acid sequence of SEQ ID NOS: 816, 135, and 817, respectively.

[0099] The disclosure describes an antibody, antigen binding fragment, or polypeptide comprising a heavy chain variable region having a HCDR1, HCDR2, and HCDR3, and a light HCDR3 comprises an amino acid sequence of SEQ ID NOS: 56, 821, and 822, respectively and the LCDR1, LCDR2, and LCDR3 comprises an amino acid sequence of SEQ ID NOS: 403, 404, and 826, respectively.

[0100] The disclosure describes an antibody, antigen binding fragment, or polypeptide comprising a heavy chain variable region having a HCDR1, HCDR2, and HCDR3, and a light chain variable region having a LCDR1, LCDR2, and LCDR3, wherein the HCDR1, HCDR2, and HCDR3 comprises an amino acid sequence of SEQ ID NOS: 829, 830, and 831, respectively and the LCDR1, LCDR2, and LCDR3 comprises an amino acid sequence of SEQ ID NOS: 837, 64, and 838, respectively.

[0101] The disclosure describes an antibody, antigen binding fragment, or polypeptide comprising a heavy chain variable region having a HCDR1, HCDR2, and HCDR3, and a light chain variable region having a LCDR1, LCDR2, and LCDR3, wherein the HCDR1, HCDR2, and HCDR3 comprises an amino acid sequence of SEQ ID NOS: 842, 843, and 844, respectively and the LCDR1, LCDR2, and LCDR3 comprises an amino acid sequence of SEQ ID NOS: 520, 387, and 646, respectively.

[0102] The disclosure describes an antibody, antigen binding fragment, or polypeptide comprising a heavy chain variable region having a HCDR1, HCDR2, and HCDR3, and a light chain variable region having a LCDR1, LCDR2, and LCDR3, wherein the HCDR1, HCDR2, and HCDR3 comprises an amino acid sequence of SEQ ID NOS: 850, 851, and 852, respectively and the LCDR1, LCDR2, and LCDR3 comprises an amino acid sequence of SEQ ID NOS: 520, 387, and 856, respectively.

[0103] The disclosure describes an antibody, antigen binding fragment, or polypeptide comprising a heavy chain variable region having a HCDR1, HCDR2, and HCDR3, and a light chain variable region having a LCDR1, LCDR2, and LCDR3, wherein the HCDR1, HCDR2, and HCDR3 comprises an amino acid sequence of SEQ ID NOS: 860, 861, and 862, respectively and the LCDR1, LCDR2, and LCDR3 comprises an amino acid sequence of SEQ ID NOS: 867, 868, and 869, respectively.

[0104] The disclosure describes an antibody, antigen binding fragment, or polypeptide comprising a heavy chain variable region having a HCDR1, HCDR2, and HCDR3, and a light HCDR3 comprises an amino acid sequence of SEQ ID NOS: 542, 875, and 876, respectively and the LCDR1, LCDR2, and LCDR3 comprises an amino acid sequence of SEQ ID NOS: 881, 387, and 882, respectively.

[0105] The disclosure describes an antibody, antigen binding fragment, or polypeptide comprising a heavy chain variable region having a HCDR1, HCDR2, and HCDR3, and a light chain variable region having a LCDR1, LCDR2, and LCDR3, wherein the HCDR1, HCDR2, and HCDR3 comprises an amino acid sequence of SEQ ID NOS: 888, 889, and 890, respectively and the LCDR1, LCDR2, and LCDR3 comprises an amino acid sequence of SEQ ID NOS: 895, 208, and 303, respectively.

[0106] The disclosure describes an antibody, antigen binding fragment, or polypeptide comprising a heavy chain variable region having a HCDR1, HCDR2, and HCDR3, and a light chain variable region having a LCDR1, LCDR2, and LCDR3, wherein the HCDR1, HCDR2, and HCDR3 comprises an amino acid sequence of SEQ ID NOS: 126, 899, and 900, respectively and the LCDR1, LCDR2, and LCDR3 comprises an amino acid sequence of SEQ ID NOS: 904, 905, and 906, respectively.

[0107] The disclosure describes an antibody, antigen binding fragment, or polypeptide comprising a heavy chain variable region having a HCDR1, HCDR2, and HCDR3, and a light chain variable region having a LCDR1, LCDR2, and LCDR3, wherein the HCDR1, HCDR2, and HCDR3 comprises an amino acid sequence of SEQ ID NOS: 610, 910, and 911, respectively and the LCDR1, LCDR2, and LCDR3 comprises an amino acid sequence of SEQ ID NOS: 645, 915, and 916, respectively.

[0108] The disclosure describes an antibody, antigen binding fragment, or polypeptide comprising a heavy chain variable region having a HCDR1, HCDR2, and HCDR3, and a light chain variable region having a LCDR1, LCDR2, and LCDR3, wherein the HCDR1, HCDR2, and HCDR3 comprises an amino acid sequence of SEQ ID NOS: 919, 920, and 921, respectively and the LCDR1, LCDR2, and LCDR3 comprises an amino acid sequence of SEQ ID NOS: 291, 30, and 924, respectively.

[0109] The disclosure describes an antibody, antigen binding fragment, or polypeptide comprising a heavy chain variable region having a HCDR1, HCDR2, and HCDR3, and a light HCDR3 comprises an amino acid sequence of SEQ ID NOS: 929, 930, and 931, respectively and the LCDR1, LCDR2, and LCDR3 comprises an amino acid sequence of SEQ ID NOS: 935, 151, and 936, respectively.

[0110] The disclosure describes an antibody, antigen binding fragment, or polypeptide comprising a heavy chain variable region having a HCDR1, HCDR2, and HCDR3, and a light chain variable region having a LCDR1, LCDR2, and LCDR3, wherein the HCDR1, HCDR2, and HCDR3 comprises an amino acid sequence of SEQ ID NOS: 270, 940, and 941, respectively and the LCDR1, LCDR2, and LCDR3 comprises an amino acid sequence of SEQ ID NOS: 12, 947, and 948, respectively.

[0111] The disclosure describes an antibody, antigen binding fragment, or polypeptide comprising a heavy chain variable region having a HCDR1, HCDR2, and HCDR3, and a light chain variable region having a LCDR1, LCDR2, and LCDR3, wherein the HCDR1, HCDR2, and HCDR3 comprises an amino acid sequence of SEQ ID NOS: 187, 953, and 954, respectively and the LCDR1, LCDR2, and LCDR3 comprises an amino acid sequence of SEQ ID NOS: 63, 94, and 959, respectively.

[0112] The disclosure describes an antibody, antigen binding fragment, or polypeptide comprising a heavy chain variable region having a HCDR1, HCDR2, and HCDR3, and a light chain variable region having a LCDR1, LCDR2, and LCDR3, wherein the HCDR1, HCDR2, and HCDR3 comprises an amino acid sequence of SEQ ID NOS: 56, 4, and 963, respectively and the LCDR1, LCDR2, and LCDR3 comprises an amino acid sequence of SEQ ID NOS: 432, 249, and 966, respectively.

[0113] The disclosure describes an antibody, antigen binding fragment, or polypeptide comprising a heavy chain variable region having a HCDR1, HCDR2, and HCDR3, and a light chain variable region having a LCDR1, LCDR2, and LCDR3, wherein the HCDR1, HCDR2, and HCDR3 comprises an amino acid sequence of SEQ ID NOS: 929, 930, and 931, respectively and the LCDR1, LCDR2, and LCDR3 comprises an amino acid sequence of SEQ ID NOS: 935, 151, and 936, respectively.

[0114] The disclosure describes an antibody, antigen binding fragment, or polypeptide comprising a heavy chain variable region having a HCDR1, HCDR2, and HCDR3, and a light HCDR3 comprises an amino acid sequence of SEQ ID NOS: 187, 953, and 970, respectively and the LCDR1, LCDR2, and LCDR3 comprises an amino acid sequence of SEQ ID NOS: 63, 974, and 975, respectively.

[0115] The disclosure describes an antibody, antigen binding fragment, or polypeptide comprising a heavy chain variable region having a HCDR1, HCDR2, and HCDR3, and a light chain variable region having a LCDR1, LCDR2, and LCDR3, wherein the HCDR1, HCDR2, and HCDR3 comprises an amino acid sequence of SEQ ID NOS: 979, 980, and 981, respectively and the LCDR1, LCDR2, and LCDR3 comprises an amino acid sequence of SEQ ID NOS: 63, 151, and 986, respectively.

[0116] The disclosure describes an antibody, antigen binding fragment, or polypeptide comprising a heavy chain variable region having a HCDR1, HCDR2, and HCDR3, and a light chain variable region having a LCDR1, LCDR2, and LCDR3, wherein the HCDR1, HCDR2, and HCDR3 comprises an amino acid sequence of SEQ ID NOS: 990, 991, and 992, respectively and the LCDR1, LCDR2, and LCDR3 comprises an amino acid sequence of SEQ ID NOS: 995, 770, and 996, respectively.

[0117] The disclosure describes an antibody, antigen binding fragment, or polypeptide comprising a heavy chain variable region having a HCDR1, HCDR2, and HCDR3, and a light chain variable region having a LCDR1, LCDR2, and LCDR3, wherein the HCDR1, HCDR2, and HCDR3 comprises an amino acid sequence of SEQ ID NOS: 308, 1000, and 1001, respectively and the LCDR1, LCDR2, and LCDR3 comprises an amino acid sequence of SEQ ID NOS: 63, 94, and 1005, respectively.

[0118] The disclosure describes an antibody, antigen binding fragment, or polypeptide comprising a heavy chain variable region having a HCDR1, HCDR2, and HCDR3, and a light chain variable region having a LCDR1, LCDR2, and LCDR3, wherein the HCDR1, HCDR2, and HCDR3 comprises an amino acid sequence of SEQ ID NOS: 1009, 1010, and 1011, respectively and the LCDR1, LCDR2, and LCDR3 comprises an amino acid sequence of SEQ ID NOS: 1017, 64, and 1018, respectively.

[0119] The disclosure describes an antibody, antigen binding fragment, or polypeptide comprising a heavy chain variable region having a HCDR1, HCDR2, and HCDR3, and a light HCDR3 comprises an amino acid sequence of SEQ ID NOS: 187, 1023, and 1024, respectively and the LCDR1, LCDR2, and LCDR3 comprises an amino acid sequence of SEQ ID NOS: 1028, 94, and 1029, respectively.

[0120] The disclosure describes an antibody, antigen binding fragment, or polypeptide comprising a heavy chain variable region having a HCDR1, HCDR2, and HCDR3, and a light chain variable region having a LCDR1, LCDR2, and LCDR3, wherein the HCDR1, HCDR2, and HCDR3 comprises an amino acid sequence of SEQ ID NOS: 56, 333, and 1032, respectively and the LCDR1, LCDR2, and LCDR3 comprises an amino acid sequence of SEQ ID NOS: 1036, 249, and 1037, respectively.

[0121] The disclosure describes an antibody, antigen binding fragment, or polypeptide comprising a heavy chain variable region having a HCDR1, HCDR2, and HCDR3, and a light chain variable region having a LCDR1, LCDR2, and LCDR3, wherein the HCDR1, HCDR2, and HCDR3 comprises an amino acid sequence of SEQ ID NOS: 187, 953, and 1042, respectively and the LCDR1, LCDR2, and LCDR3 comprises an amino acid sequence of SEQ ID NOS: 63, 64, and 1046, respectively.

[0122] The disclosure describes an antibody, antigen binding fragment, or polypeptide comprising a heavy chain variable region having a HCDR1, HCDR2, and HCDR3, and a light chain variable region having a LCDR1, LCDR2, and LCDR3, wherein the HCDR1, HCDR2, and HCDR3 comprises an amino acid sequence of SEQ ID NOS: 1049, 1050, and 1051, respectively and the LCDR1, LCDR2, and LCDR3 comprises an amino acid sequence of SEQ ID NOS: 1058, 387, and 1059, respectively.

[0123] The disclosure describes an antibody, antigen binding fragment, or polypeptide comprising a heavy chain variable region having a HCDR1, HCDR2, and HCDR3, and a light chain variable region having a LCDR1, LCDR2, and LCDR3, wherein the HCDR1, HCDR2, and HCDR3 comprises an amino acid sequence of SEQ ID NOS: 1062, 1063, and 1064, respectively and the LCDR1, LCDR2, and LCDR3 comprises an amino acid sequence of SEQ ID NOS: 1070, 441, and 1071, respectively.

[0124] The disclosure describes an antibody, antigen binding fragment, or polypeptide comprising a heavy chain variable region having a HCDR1, HCDR2, and HCDR3, and a light HCDR3 comprises an amino acid sequence of SEQ ID NOS: 457, 458, and 1076, respectively and the LCDR1, LCDR2, and LCDR3 comprises an amino acid sequence of SEQ ID NOS: 1082, 208, and 1083, respectively.

[0125] The disclosure describes an antibody, antigen binding fragment, or polypeptide comprising a heavy chain variable region having a HCDR1, HCDR2, and HCDR3, and a light chain variable region having a LCDR1, LCDR2, and LCDR3, wherein the HCDR1, HCDR2, and HCDR3 comprises an amino acid sequence of SEQ ID NOS: 457, 1087, and 1088, respectively and the LCDR1, LCDR2, and LCDR3 comprises an amino acid sequence of SEQ ID NOS: 1091, 208, and 1092, respectively.

[0126] The disclosure describes an antibody, antigen binding fragment, or polypeptide comprising a heavy chain variable region having a HCDR1, HCDR2, and HCDR3, and a light chain variable region having a LCDR1, LCDR2, and LCDR3, wherein the HCDR1, HCDR2, and HCDR3 comprises an amino acid sequence of SEQ ID NOS: 1062, 1095, and 1096, respectively and the LCDR1, LCDR2, and LCDR3 comprises an amino acid sequence of SEQ ID NOS: 1101, 1102, and 1103, respectively.

[0127] The disclosure describes an antibody, antigen binding fragment, or polypeptide comprising a heavy chain variable region having a HCDR1, HCDR2, and HCDR3, and a light chain variable region having a LCDR1, LCDR2, and LCDR3, wherein the HCDR1, HCDR2, and HCDR3 comprises an amino acid sequence of SEQ ID NOS: 1109, 4, and 1110, respectively and the LCDR1, LCDR2, and LCDR3 comprises an amino acid sequence of SEQ ID NOS: 1115, 1116, and 1117, respectively.

[0128] The disclosure describes an antibody, antigen binding fragment, or polypeptide comprising a heavy chain variable region having a HCDR1, HCDR2, and HCDR3, and a light chain variable region having a LCDR1, LCDR2, and LCDR3, wherein the HCDR1, HCDR2, and HCDR3 comprises an amino acid sequence of SEQ ID NOS: 1123, 1124, and 1125, respectively and the LCDR1, LCDR2, and LCDR3 comprises an amino acid sequence of SEQ ID NOS: 1130, 1131, and 1132, respectively.

[0129] The disclosure describes an antibody, antigen binding fragment, or polypeptide comprising a heavy chain variable region having a HCDR1, HCDR2, and HCDR3, and a light HCDR3 comprises an amino acid sequence of SEQ ID NOS: 610, 1137, and 1138, respectively and the LCDR1, LCDR2, and LCDR3 comprises an amino acid sequence of SEQ ID NOS: 1142, 1143, and 1144, respectively.

[0130] The disclosure describes an antibody, antigen binding fragment, or polypeptide comprising a heavy chain variable region having a HCDR1, HCDR2, and HCDR3, and a light chain variable region having a LCDR1, LCDR2, and LCDR3, wherein the HCDR1, HCDR2, and HCDR3 comprises an amino acid sequence of SEQ ID NOS: 141, 142, and 1149, respectively and the LCDR1, LCDR2, and LCDR3 comprises an amino acid sequence of SEQ ID NOS: 1152, 249, and 1153, respectively.

[0131] The disclosure describes an antibody, antigen binding fragment, or polypeptide comprising a heavy chain variable region having a HCDR1, HCDR2, and HCDR3, and a light chain variable region having a LCDR1, LCDR2, and LCDR3, wherein the HCDR1, HCDR2, and HCDR3 comprises an amino acid sequence of SEQ ID NOS: 1157, 1158, and 1159, respectively and the LCDR1, LCDR2, and LCDR3 comprises an amino acid sequence of SEQ ID NOS: 1165, 1166, and 1167, respectively.

[0132] The disclosure describes an antibody, antigen binding fragment, or polypeptide comprising a heavy chain variable region having a HCDR1, HCDR2, and HCDR3, and a light chain variable region having a LCDR1, LCDR2, and LCDR3, wherein the HCDR1, HCDR2, and HCDR3 comprises an amino acid sequence of SEQ ID NOS: 1171, 1172, and 1173, respectively and the LCDR1, LCDR2, and LCDR3 comprises an amino acid sequence of SEQ ID NOS: 248, 249, and 1179, respectively.

[0133] The disclosure describes an antibody, antigen binding fragment, or polypeptide comprising a heavy chain variable region having a HCDR1, HCDR2, and HCDR3, and a light chain variable region having a LCDR1, LCDR2, and LCDR3, wherein the HCDR1, HCDR2, and HCDR3 comprises an amino acid sequence of SEQ ID NOS: 1184, 1185, and 1186, respectively and the LCDR1, LCDR2, and LCDR3 comprises an amino acid sequence of SEQ ID NOS: 1191, 1192, and 1193, respectively.

[0134] The disclosure describes an antibody, antigen binding fragment, or polypeptide comprising a heavy chain variable region having a HCDR1, HCDR2, and HCDR3, and a light HCDR3 comprises an amino acid sequence of SEQ ID NOS: 126, 127, and 1199, respectively and the LCDR1, LCDR2, and LCDR3 comprises an amino acid sequence of SEQ ID NOS: 338, 135, and 1202, respectively.

[0135] The disclosure describes an antibody, antigen binding fragment, or polypeptide comprising a heavy chain variable region having a HCDR1, HCDR2, and HCDR3, and a light chain variable region having a LCDR1, LCDR2, and LCDR3, wherein the HCDR1, HCDR2, and HCDR3 comprises an amino acid sequence of SEQ ID NOS: 1205, 1206, and 1207, respectively and the LCDR1, LCDR2, and LCDR3 comprises an amino acid sequence of SEQ ID NOS: 338, 1211, and 1212, respectively.

[0136] The disclosure describes an antibody, antigen binding fragment, or polypeptide comprising a heavy chain variable region having a HCDR1, HCDR2, and HCDR3, and a light chain variable region having a LCDR1, LCDR2, and LCDR3, wherein the HCDR1, HCDR2, and HCDR3 comprises an amino acid sequence of SEQ ID NOS: 1216, 1217, and 1218, respectively and the LCDR1, LCDR2, and LCDR3 comprises an amino acid sequence of SEQ ID NOS: 673, 350, and 1222, respectively.

[0137] The disclosure describes an antibody, antigen binding fragment, or polypeptide comprising a heavy chain variable region having a HCDR1, HCDR2, and HCDR3, and a light chain variable region having a LCDR1, LCDR2, and LCDR3, wherein the HCDR1, HCDR2, and HCDR3 comprises an amino acid sequence of SEQ ID NOS: 1226, 1227, and 1228, respectively and the LCDR1, LCDR2, and LCDR3 comprises an amino acid sequence of SEQ ID NOS: 673, 1232, and 1222, respectively.

[0138] The disclosure describes an antibody, antigen binding fragment, or polypeptide comprising a heavy chain variable region having a HCDR1, HCDR2, and HCDR3, and a light chain variable region having a LCDR1, LCDR2, and LCDR3, wherein the HCDR1, HCDR2, and HCDR3 comprises an amino acid sequence of SEQ ID NOS: 1235, 1236, and 1237, respectively and the LCDR1, LCDR2, and LCDR3 comprises an amino acid sequence of SEQ ID NOS: 1243, 592, and 1244, respectively.

[0139] The disclosure describes an antibody, antigen binding fragment, or polypeptide comprising a heavy chain variable region having a HCDR1, HCDR2, and HCDR3, and a light HCDR3 comprises an amino acid sequence of SEQ ID NOS: 1249, 1250, and 1251, respectively and the LCDR1, LCDR2, and LCDR3 comprises an amino acid sequence of SEQ ID NOS: 570, 249, and 1255, respectively.

[0140] The disclosure describes an antibody, antigen binding fragment, or polypeptide comprising a heavy chain variable region having a HCDR1, HCDR2, and HCDR3, and a light chain variable region having a LCDR1, LCDR2, and LCDR3, wherein the HCDR1, HCDR2, and HCDR3 comprises an amino acid sequence of SEQ ID NOS: 1258, 1259, and 1260, respectively and the LCDR1, LCDR2, and LCDR3 comprises an amino acid sequence of SEQ ID NOS: 769, 1265, and 1266, respectively.

[0141] The disclosure describes an antibody, antigen binding fragment, or polypeptide comprising a heavy chain variable region having a HCDR1, HCDR2, and HCDR3, and a light chain variable region having a LCDR1, LCDR2, and LCDR3, wherein the HCDR1, HCDR2, and HCDR3 comprises an amino acid sequence of SEQ ID NOS: 1205, 1206, and 1207, respectively and the LCDR1, LCDR2, and LCDR3 comprises an amino acid sequence of SEQ ID NOS: 338, 1211, and 1212, respectively.

[0142] The disclosure describes an antibody, antigen binding fragment, or polypeptide comprising a heavy chain variable region having a HCDR1, HCDR2, and HCDR3, and a light chain variable region having a LCDR1, LCDR2, and LCDR3, wherein the HCDR1, HCDR2, and HCDR3 comprises an amino acid sequence of SEQ ID NOS: 1272, 1273, and 1274, respectively and the LCDR1, LCDR2, and LCDR3 comprises an amino acid sequence of SEQ ID NOS: 63, 1280, and 1281, respectively.

[0143] The disclosure describes an antibody, antigen binding fragment, or polypeptide comprising a heavy chain variable region having a HCDR1, HCDR2, and HCDR3, and a light chain variable region having a LCDR1, LCDR2, and LCDR3, wherein the HCDR1, HCDR2, and HCDR3 comprises an amino acid sequence of SEQ ID NOS: 1184, 1185, and 1186, respectively and the LCDR1, LCDR2, and LCDR3 comprises an amino acid sequence of SEQ ID NOS: 1191, 1192, and 1193, respectively.

[0144] The disclosure describes an antibody, antigen binding fragment, or polypeptide comprising a heavy chain variable region having a HCDR1, HCDR2, and HCDR3, and a light HCDR3 comprises an amino acid sequence of SEQ ID NOS: 1216, 1217, and 1218, respectively and the LCDR1, LCDR2, and LCDR3 comprises an amino acid sequence of SEQ ID NOS: 673, 350, and 1222, respectively.

[0145] The disclosure describes an antibody, antigen binding fragment, or polypeptide comprising a heavy chain variable region having a HCDR1, HCDR2, and HCDR3, and a light chain variable region having a LCDR1, LCDR2, and LCDR3, wherein the HCDR1, HCDR2, and HCDR3 comprises an amino acid sequence of SEQ ID NOS: 72, 1286, and 1287, respectively and the LCDR1, LCDR2, and LCDR3 comprises an amino acid sequence of SEQ ID NOS: 1293, 30, and 1294, respectively.

[0146] The disclosure describes an antibody, antigen binding fragment, or polypeptide comprising a heavy chain variable region having a HCDR1, HCDR2, and HCDR3, and a light chain variable region having a LCDR1, LCDR2, and LCDR3, wherein the HCDR1, HCDR2, and HCDR3 comprises an amino acid sequence of SEQ ID NOS: 1299, 1300, and 1301, respectively and the LCDR1, LCDR2, and LCDR3 comprises an amino acid sequence of SEQ ID NOS: 63, 151, and 1306, respectively.

[0147] The disclosure describes an antibody, antigen binding fragment, or polypeptide comprising a heavy chain variable region having a HCDR1, HCDR2, and HCDR3, and a light chain variable region having a LCDR1, LCDR2, and LCDR3, wherein the HCDR1, HCDR2, and HCDR3 comprises an amino acid sequence of SEQ ID NOS: 1311, 4, and 1312, respectively and the LCDR1, LCDR2, and LCDR3 comprises an amino acid sequence of SEQ ID NOS: 816, 135, and 1318, respectively.

[0148] The disclosure describes an antibody, antigen binding fragment, or polypeptide comprising a heavy chain variable region having a HCDR1, HCDR2, and HCDR3, and a light chain variable region having a LCDR1, LCDR2, and LCDR3, wherein the HCDR1, HCDR2, and HCDR3 comprises an amino acid sequence of SEQ ID NOS: 1226, 1227, and 1228, respectively and the LCDR1, LCDR2, and LCDR3 comprises an amino acid sequence of SEQ ID NOS: 673, 1232, and 1222, respectively.

[0149] The disclosure describes an antibody, antigen binding fragment, or polypeptide comprising a heavy chain variable region having a HCDR1, HCDR2, and HCDR3, and a light HCDR3 comprises an amino acid sequence of SEQ ID NOS: 1258, 1259, and 1260, respectively and the LCDR1, LCDR2, and LCDR3 comprises an amino acid sequence of SEQ ID NOS: 769, 1265, and 1266, respectively.

[0150] The disclosure describes an antibody, antigen binding fragment, or polypeptide comprising a heavy chain variable region having a HCDR1, HCDR2, and HCDR3, and a light chain variable region having a LCDR1, LCDR2, and LCDR3, wherein the HCDR1, HCDR2, and HCDR3 comprises an amino acid sequence of SEQ ID NOS: 1321, 1322, and 1323, respectively and the LCDR1, LCDR2, and LCDR3 comprises an amino acid sequence of SEQ ID NOS: 1329, 1330, and 1331, respectively.

[0151] The disclosure describes an antibody, antigen binding fragment, or polypeptide comprising a heavy chain variable region having a HCDR1, HCDR2, and HCDR3, and a light chain variable region having a LCDR1, LCDR2, and LCDR3, wherein the HCDR1, HCDR2, and HCDR3 comprises an amino acid sequence of SEQ ID NOS: 1321, 1322, and 1323, respectively and the LCDR1, LCDR2, and LCDR3 comprises an amino acid sequence of SEQ ID NOS: 1329, 1330, and 1331, respectively.

[0152] The disclosure describes an antibody, antigen binding fragment, or polypeptide comprising a heavy chain variable region having a HCDR1, HCDR2, and HCDR3, and a light chain variable region having a LCDR1, LCDR2, and LCDR3, wherein the HCDR1, HCDR2, and HCDR3 comprises an amino acid sequence of SEQ ID NOS: 1272, 1273, and 1274, respectively and the LCDR1, LCDR2, and LCDR3 comprises an amino acid sequence of SEQ ID NOS: 63, 1280, and 1281, respectively.

[0153] The disclosure describes an antibody, antigen binding fragment, or polypeptide comprising a heavy chain variable region having a HCDR1, HCDR2, and HCDR3, and a light chain variable region having a LCDR1, LCDR2, and LCDR3, wherein the HCDR1, HCDR2, and HCDR3 comprises an amino acid sequence of SEQ ID NOS: 72, 1286, and 1287, respectively and the LCDR1, LCDR2, and LCDR3 comprises an amino acid sequence of SEQ ID NOS: 1293, 30, and 1294, respectively.

[0154] The disclosure describes an antibody, antigen binding fragment, or polypeptide comprising a heavy chain variable region having a HCDR1, HCDR2, and HCDR3, and a light HCDR3 comprises an amino acid sequence of SEQ ID NOS: 1335, 1336, and 1337, respectively and the LCDR1, LCDR2, and LCDR3 comprises an amino acid sequence of SEQ ID NOS: 1342, 1343, and 1344, respectively.

[0155] The disclosure describes an antibody, antigen binding fragment, or polypeptide comprising a heavy chain variable region having a HCDR1, HCDR2, and HCDR3, and a light chain variable region having a LCDR1, LCDR2, and LCDR3, wherein the HCDR1, HCDR2, and HCDR3 comprises an amino acid sequence of SEQ ID NOS: 1350, 1351, and 1352, respectively and the LCDR1, LCDR2, and LCDR3 comprises an amino acid sequence of SEQ ID NOS: 1359, 30, and 1360, respectively.

[0156] The disclosure describes an antibody, antigen binding fragment, or polypeptide comprising a heavy chain variable region having a HCDR1, HCDR2, and HCDR3, and a light chain variable region having a LCDR1, LCDR2, and LCDR3, wherein the HCDR1, HCDR2, and HCDR3 comprises an amino acid sequence of SEQ ID NOS: 187, 585, and 1363, respectively and the LCDR1, LCDR2, and LCDR3 comprises an amino acid sequence of SEQ ID NOS: 63, 151, and 1366, respectively.

[0157] The disclosure describes an antibody, antigen binding fragment, or polypeptide comprising a heavy chain variable region having a HCDR1, HCDR2, and HCDR3, and a light chain variable region having a LCDR1, LCDR2, and LCDR3, wherein the HCDR1, HCDR2, and HCDR3 comprises an amino acid sequence of SEQ ID NOS: 1369, 1370, and 1371, respectively and the LCDR1, LCDR2, and LCDR3 comprises an amino acid sequence of SEQ ID NOS: 338, 135, and 1375, respectively.

[0158] The disclosure describes an antibody, antigen binding fragment, or polypeptide comprising a heavy chain variable region having a HCDR1, HCDR2, and HCDR3, and a light chain variable region having a LCDR1, LCDR2, and LCDR3, wherein the HCDR1, HCDR2, and HCDR3 comprises an amino acid sequence of SEQ ID NOS: 187, 585, and 1363, respectively and the LCDR1, LCDR2, and LCDR3 comprises an amino acid sequence of SEQ ID NOS: 63, 151, and 1366, respectively.

[0159] The disclosure describes an antibody, antigen binding fragment, or polypeptide comprising a heavy chain variable region having a HCDR1, HCDR2, and HCDR3, and a light HCDR3 comprises an amino acid sequence of SEQ ID NOS: 1378, 1379, and 1380, respectively and the LCDR1, LCDR2, and LCDR3 comprises an amino acid sequence of SEQ ID NOS: 1385, 441, and 1386, respectively.

[0160] The disclosure describes an antibody, antigen binding fragment, or polypeptide comprising a heavy chain variable region having a HCDR1, HCDR2, and HCDR3, and a light chain variable region having a LCDR1, LCDR2, and LCDR3, wherein the HCDR1, HCDR2, and HCDR3 comprises an amino acid sequence of SEQ ID NOS: 1389, 953, and 1390, respectively and the LCDR1, LCDR2, and LCDR3 comprises an amino acid sequence of SEQ ID NOS: 1395, 1396, and 1397, respectively.

[0161] The disclosure describes an antibody, antigen binding fragment, or polypeptide comprising a heavy chain variable region having a HCDR1, HCDR2, and HCDR3, and a light chain variable region having a LCDR1, LCDR2, and LCDR3, wherein the HCDR1, HCDR2, and HCDR3 comprises an amino acid sequence of SEQ ID NOS: 1369, 1370, and 1371, respectively and the LCDR1, LCDR2, and LCDR3 comprises an amino acid sequence of SEQ ID NOS: 338, 135, and 1375, respectively.

[0162] The disclosure describes an antibody, antigen binding fragment, or polypeptide comprising a heavy chain variable region having a HCDR1, HCDR2, and HCDR3, and a light chain variable region having a LCDR1, LCDR2, and LCDR3, wherein the HCDR1, HCDR2, and HCDR3 comprises an amino acid sequence of SEQ ID NOS: 141, 142, and 1149, respectively and the LCDR1, LCDR2, and LCDR3 comprises an amino acid sequence of SEQ ID NOS: 1152, 249, and 1153, respectively.

[0163] The disclosure describes an antibody, antigen binding fragment, or polypeptide comprising a heavy chain variable region having a HCDR1, HCDR2, and HCDR3, and a light chain variable region having a LCDR1, LCDR2, and LCDR3, wherein the HCDR1, HCDR2, and HCDR3 comprises an amino acid sequence of SEQ ID NOS: 1402, 1403, and 1404, respectively and the LCDR1, LCDR2, and LCDR3 comprises an amino acid sequence of SEQ ID NOS: 1036, 249, and 1408, respectively.

[0164] The disclosure describes an antibody, antigen binding fragment, or polypeptide comprising a heavy chain variable region having a HCDR1, HCDR2, and HCDR3, and a light HCDR3 comprises an amino acid sequence of SEQ ID NOS: 1378, 1379, and 1380, respectively and the LCDR1, LCDR2, and LCDR3 comprises an amino acid sequence of SEQ ID NOS: 1385, 441, and 1386, respectively.

[0165] The disclosure describes an antibody, antigen binding fragment, or polypeptide comprising a heavy chain variable region having a HCDR1, HCDR2, and HCDR3, and a light chain variable region having a LCDR1, LCDR2, and LCDR3, wherein the HCDR1, HCDR2, and HCDR3 comprises an amino acid sequence of SEQ ID NOS: 1184, 1185, and 1186, respectively and the LCDR1, LCDR2, and LCDR3 comprises an amino acid sequence of SEQ ID NOS: 1191, 1192, and 1193, respectively.

[0166] The disclosure describes an antibody, antigen binding fragment, or polypeptide comprising a heavy chain variable region having a HCDR1, HCDR2, and HCDR3, and a light chain variable region having a LCDR1, LCDR2, and LCDR3, wherein the HCDR1, HCDR2, and HCDR3 comprises an amino acid sequence of SEQ ID NOS: 1389, 953, and 1390, respectively and the LCDR1, LCDR2, and LCDR3 comprises an amino acid sequence of SEQ ID NOS: 1395, 1396, and 1397, respectively.

[0167] The disclosure describes an antibody, antigen binding fragment, or polypeptide comprising a heavy chain variable region having a HCDR1, HCDR2, and HCDR3, and a light chain variable region having a LCDR1, LCDR2, and LCDR3, wherein the HCDR1, HCDR2, and HCDR3 comprises an amino acid sequence of SEQ ID NOS: 1412, 1413, and 1414, respectively and the LCDR1, LCDR2, and LCDR3 comprises an amino acid sequence of SEQ ID NOS: 1395, 94, and 1419, respectively.

[0168] The disclosure describes an antibody, antigen binding fragment, or polypeptide comprising a heavy chain variable region having a HCDR1, HCDR2, and HCDR3, and a light chain variable region having a LCDR1, LCDR2, and LCDR3, wherein the HCDR1, HCDR2, and HCDR3 comprises an amino acid sequence of SEQ ID NOS: 199, 1422, and 1423, respectively and the LCDR1, LCDR2, and LCDR3 comprises an amino acid sequence of SEQ ID NOS: 1428, 1429, and 1430, respectively.

[0169] The disclosure describes an antibody, antigen binding fragment, or polypeptide comprising a heavy chain variable region having a HCDR1, HCDR2, and HCDR3, and a light HCDR3 comprises an amino acid sequence of SEQ ID NOS: 798, 1436, and 1437, respectively and the LCDR1, LCDR2, and LCDR3 comprises an amino acid sequence of SEQ ID NOS: 1442, 208, and 1443, respectively.

[0170] The disclosure describes an antibody, antigen binding fragment, or polypeptide comprising a heavy chain variable region having a HCDR1, HCDR2, and HCDR3, and a light chain variable region having a LCDR1, LCDR2, and LCDR3, wherein the HCDR1, HCDR2, and HCDR3 comprises an amino acid sequence of SEQ ID NOS: 1447, 473, and 1448, respectively and the LCDR1, LCDR2, and LCDR3 comprises an amino acid sequence of SEQ ID NOS: 63, 151, and 1454, respectively.

[0171] The disclosure describes an antibody, antigen binding fragment, or polypeptide comprising a heavy chain variable region having a HCDR1, HCDR2, and HCDR3, and a light chain variable region having a LCDR1, LCDR2, and LCDR3, wherein the HCDR1, HCDR2, and HCDR3 comprises an amino acid sequence of SEQ ID NOS: 1457, 1458, and 1459, respectively and the LCDR1, LCDR2, and LCDR3 comprises an amino acid sequence of SEQ ID NOS: 1464, 1465, and 1466, respectively.

[0172] The disclosure describes an antibody, antigen binding fragment, or polypeptide comprising a heavy chain variable region having a HCDR1, HCDR2, and HCDR3, and a light chain variable region having a LCDR1, LCDR2, and LCDR3, wherein the HCDR1, HCDR2, and HCDR3 comprises an amino acid sequence of SEQ ID NOS: 1472, 1473, and 1474, respectively and the LCDR1, LCDR2, and LCDR3 comprises an amino acid sequence of SEQ ID NOS: 1478, 119, and 1479, respectively.

[0173] The disclosure describes an antibody, antigen binding fragment, or polypeptide comprising a heavy chain variable region having a HCDR1, HCDR2, and HCDR3, and a light chain variable region having a LCDR1, LCDR2, and LCDR3, wherein the HCDR1, HCDR2, and HCDR3 comprises an amino acid sequence of SEQ ID NOS: 1482, 1483, and 1484, respectively and the LCDR1, LCDR2, and LCDR3 comprises an amino acid sequence of SEQ ID NOS: 338, 1143, and 1488, respectively.

[0174] The disclosure describes an antibody, antigen binding fragment, or polypeptide comprising a heavy chain variable region having a HCDR1, HCDR2, and HCDR3, and a light HCDR3 comprises an amino acid sequence of SEQ ID NOS: 1492, 243, and 1493, respectively and the LCDR1, LCDR2, and LCDR3 comprises an amino acid sequence of SEQ ID NOS: 1497, 1498, and 1499, respectively.

[0175] The disclosure describes an antibody, antigen binding fragment, or polypeptide comprising a heavy chain variable region having a HCDR1, HCDR2, and HCDR3, and a light chain variable region having a LCDR1, LCDR2, and LCDR3, wherein the HCDR1, HCDR2, and HCDR3 comprises an amino acid sequence of SEQ ID NOS: 1505, 953, and 1506, respectively and the LCDR1, LCDR2, and LCDR3 comprises an amino acid sequence of SEQ ID NOS: 63, 592, and 1511, respectively.

[0176] The disclosure describes an antibody, antigen binding fragment, or polypeptide comprising a heavy chain variable region having a HCDR1, HCDR2, and HCDR3, and a light chain variable region having a LCDR1, LCDR2, and LCDR3, wherein the HCDR1, HCDR2, and HCDR3 comprises an amino acid sequence of SEQ ID NOS: 1515, 1516, and 1517, respectively and the LCDR1, LCDR2, and LCDR3 comprises an amino acid sequence of SEQ ID NOS: 1522, 1523, and 1524, respectively.

[0177] The disclosure describes an antibody, antigen binding fragment, or polypeptide comprising a heavy chain variable region having a HCDR1, HCDR2, and HCDR3, and a light chain variable region having a LCDR1, LCDR2, and LCDR3, wherein the HCDR1, HCDR2, and HCDR3 comprises an amino acid sequence of SEQ ID NOS: 1235, 1529, and 1530, respectively and the LCDR1, LCDR2, and LCDR3 comprises an amino acid sequence of SEQ ID NOS: 1535, 1536, and 1537, respectively.

[0178] The disclosure describes an antibody, antigen binding fragment, or polypeptide comprising a heavy chain variable region having a HCDR1, HCDR2, and HCDR3, and a light chain variable region having a LCDR1, LCDR2, and LCDR3, wherein the HCDR1, HCDR2, and HCDR3 comprises an amino acid sequence of SEQ ID NOS: 358, 392, and 1543, respectively and the LCDR1, LCDR2, and LCDR3 comprises an amino acid sequence of SEQ ID NOS: 1547, 770, and 1548, respectively.

[0179] The disclosure describes an antibody, antigen binding fragment, or polypeptide comprising a heavy chain variable region having a HCDR1, HCDR2, and HCDR3, and a light HCDR3 comprises an amino acid sequence of SEQ ID NOS: 1551, 1552, and 1553, respectively and the LCDR1, LCDR2, and LCDR3 comprises an amino acid sequence of SEQ ID NOS: 1558, 249, and 1559, respectively.

[0180] The disclosure describes an antibody, antigen binding fragment, or polypeptide comprising a heavy chain variable region having a HCDR1, HCDR2, and HCDR3, and a light chain variable region having a LCDR1, LCDR2, and LCDR3, wherein the HCDR1, HCDR2, and HCDR3 comprises an amino acid sequence of SEQ ID NOS: 1565, 1566, and 1567, respectively and the LCDR1, LCDR2, and LCDR3 comprises an amino acid sequence of SEQ ID NOS: 1572, 1573, and 1574, respectively.

[0181] The disclosure describes an antibody, antigen binding fragment, or polypeptide comprising a heavy chain variable region having a HCDR1, HCDR2, and HCDR3, and a light chain variable region having a LCDR1, LCDR2, and LCDR3, wherein the HCDR1, HCDR2, and HCDR3 comprises an amino acid sequence of SEQ ID NOS: 1579, 1580, and 1581, respectively and the LCDR1, LCDR2, and LCDR3 comprises an amino acid sequence of SEQ ID NOS: 1585, 135, and 1586, respectively.

[0182] The disclosure describes an antibody, antigen binding fragment, or polypeptide comprising a heavy chain variable region having a HCDR1, HCDR2, and HCDR3, and a light chain variable region having a LCDR1, LCDR2, and LCDR3, wherein the HCDR1, HCDR2, and HCDR3 comprises an amino acid sequence of SEQ ID NOS: 1590, 1591, and 1592, respectively and the LCDR1, LCDR2, and LCDR3 comprises an amino acid sequence of SEQ ID NOS: 1599, 135, and 1600, respectively.

[0183] The disclosure also describes a heavy and light chain comprising the sequences of SEQ ID NO: 1 and SEQ ID NO: 10; SEQ ID NO:19 and SEQ ID NO:27; SEQ ID NO:36 and SEQ ID NO: 45; SEQ ID NO:54 and SEQ ID NO:61; SEQ ID NO: 70 and SEQ ID NO:77; SEQ ID NO:86 and SEQ ID NO:92; SEQ ID NO:98 and SEQ ID NO: 107; SEQ ID NO: 109 and SEQ ID NO: 116; SEQ ID NO: 124 and SEQ ID NO: 132; SEQ ID NO:139 and SEQ ID NO:148; SEQ ID NO:154 and SEQ ID NO:162; SEQ ID NO:168 and SEQ ID NO:176; SEQ ID NO: 185 and SEQ ID NO: 192; SEQ ID NO: 197 and SEQ ID NO:205; SEQ ID NO:212 and SEQ ID NO:221; SEQ ID NO: 229 and SEQ ID NO:235; SEQ ID NO:240 and SEQ ID NO:246; SEQ ID NO:254 and SEQ ID NO: 260; SEQ ID NO:268 and SEQ ID NO:274; SEQ ID NO:282 and SEQ ID NO:289; SEQ ID NO: 294 and SEQ ID NO:300; SEQ ID NO:306 and SEQ ID NO:311; SEQ ID NO:319 and SEQ ID NO:326; SEQ ID NO:331 and SEQ ID NO:336; SEQ ID NO:340 and SEQ ID NO:347; SEQ ID NO:356 and SEQ ID NO:363; SEQ ID NO:371 and SEQ ID NO:376; SEQ ID NO:381 and SEQ ID NO:384; SEQ ID NO:390 and SEQ ID NO:394; SEQ ID NO:398 and SEQ ID NO: 401; SEQ ID NO:407 and SEQ ID NO:412; SEQ ID NO:417 and SEQ ID NO:422; SEQ ID NO: 425 and SEQ ID NO:430; SEQ ID NO: 435 and SEQ ID NO: 439; SEQ ID NO:444 and SEQ ID NO: 450; SEQ ID NO:455 and SEQ ID NO:462; SEQ ID NO:470 and SEQ ID NO:478; SEQ ID NO: 481 and SEQ ID NO:487; SEQ ID NO:495 and SEQ ID NO:500; SEQ ID NO:505 and SEQ ID NO:508; SEQ ID NO:511 and SEQ ID NO:518; SEQ ID NO:525 and SEQ ID NO:533; SEQ ID NO:540 and SEQ ID NO:546; SEQ ID NO:551 and SEQ ID NO:558; SEQ ID NO:561 and SEQ ID NO:568; SEQ ID NO:574 and SEQ ID NO:579; SEQ ID NO:583 and SEQ ID NO: 589; SEQ ID NO:597 and SEQ ID NO:603; SEQ ID NO:608 and SEQ ID NO:615; SEQ ID NO: 620 and SEQ ID NO: 628; SEQ ID NO:636 and SEQ ID NO:643; SEQ ID NO:648 and SEQ ID NO: 652; SEQ ID NO:656 and SEQ ID NO:662; SEQ ID NO:665 and SEQ ID NO:671; SEQ ID NO: 677 and SEQ ID NO:684; SEQ ID NO:691 and SEQ ID NO:696; SEQ ID NO: 702 and SEQ ID NO:706; SEQ ID NO:709 and SEQ ID NO:714; SEQ ID NO:722 and SEQ ID NO:726; SEQ ID NO: 732 and SEQ ID NO: 738; SEQ ID NO: 742 and SEQ ID NO:748; SEQ ID NO:752 and SEQ ID NO:759; SEQ ID NO:763 and SEQ ID NO:767; SEQ ID NO:773 and SEQ ID NO: 780; SEQ ID NO: 784 and SEQ ID NO: 792; SEQ ID NO: 796 and SEQ ID NO:802; SEQ ID NO: 807 and SEQ ID NO:814; SEQ ID NO:819 and SEQ ID NO: 824; SEQ ID NO:827 and SEQ ID NO: 835; SEQ ID NO:840 and SEQ ID NO:846; SEQ ID NO:848 and SEQ ID NO:854; SEQ ID NO: 858 and SEQ ID NO:865; SEQ ID NO:873 and SEQ ID NO:879; SEQ ID NO:886 and SEQ ID NO:893; SEQ ID NO:897 and SEQ ID NO:902; SEQ ID NO:908 and SEQ ID NO:913; SEQ ID NO:917 and SEQ ID NO:922; SEQ ID NO:927 and SEQ ID NO:933; SEQ ID NO:938 and SEQ ID NO:945; SEQ ID NO:951 and SEQ ID NO:957; SEQ ID NO:961 and SEQ ID NO: 964; SEQ ID NO: 927 and SEQ ID NO:933; SEQ ID NO:968 and SEQ ID NO:972; SEQ ID NO: 977 and SEQ ID NO: 984; SEQ ID NO: 988 and SEQ ID NO: 993; SEQ ID NO:998 and SEQ ID NO: 1003; SEQ ID NO: 1007 and SEQ ID NO:1015; SEQ ID NO:1021 and SEQ ID NO:1026; SEQ ID NO:1030 and SEQ ID NO:1034; SEQ ID NO: 1040 and SEQ ID NO: 1044; SEQ ID NO: 1047 and SEQ ID NO: 1056; SEQ ID NO: 1060 and SEQ ID NO: 1068; SEQ ID NO: 1074 and SEQ ID NO:1080; SEQ ID NO: 1085 and SEQ ID NO: 1089; SEQ ID NO: 1093 and SEQ ID NO: 1099; SEQ ID NO: 1107 and SEQ ID NO: 1113; SEQ ID NO: 1121 and SEQ ID NO:1128; SEQ ID NO:1135 and SEQ ID NO:1140; SEQ ID NO:1147 and SEQ ID NO: 1150; SEQ ID NO: 1155 and SEQ ID NO:1163; SEQ ID NO:1169 and SEQ ID NO: 1177; SEQ ID NO: 1182 and SEQ ID NO: 1189; SEQ ID NO:1197 and SEQ ID NO: 1200; SEQ ID NO:1203 and SEQ ID NO: 1209; SEQ ID NO: 1214 and SEQ ID NO: 1220; SEQ ID NO: 1224 and SEQ ID NO: 1230; SEQ ID NO: 1233 and SEQ ID NO: 1241; SEQ ID NO:1247 and SEQ ID NO: 1253; SEQ ID NO: 1256 and SEQ ID NO: 1263; SEQ ID NO: 1203 and SEQ ID NO: 1209; SEQ ID NO: 1270 and SEQ ID NO:1278; SEQ ID NO: 1182 and SEQ ID NO:1189; SEQ ID NO: 1214 and SEQ ID NO: 1220; SEQ ID NO: 1284 and SEQ ID NO: 1291; SEQ ID NO: 1297 and SEQ ID NO: 1304; SEQ ID NO:1309 and SEQ ID NO:1316; SEQ ID NO:1224 and SEQ ID NO: 1230; SEQ ID NO: 1256 and SEQ ID NO: 1263; SEQ ID NO: 1319 and SEQ ID NO: 1327; SEQ ID NO: 1319 and SEQ ID NO:1327; SEQ ID NO:1270 and SEQ ID NO:1278; SEQ ID NO:1284 and SEQ ID NO: 1291; SEQ ID NO: 1333 and SEQ ID NO: 1340; SEQ ID NO: 1348 and SEQ ID NO: 1357; SEQ ID NO:1361 and SEQ ID NO: 1364; SEQ ID NO:1367 and SEQ ID NO: 1374; SEQ ID NO: 1361 and SEQ ID NO: 1364; SEQ ID NO: 1376 and SEQ ID NO: 1383; SEQ ID NO: 1387 and SEQ ID NO: 1393; SEQ ID NO: 1367 and SEQ ID NO: 1374; SEQ ID NO:1147 and SEQ ID NO: 1150; SEQ ID NO:1400 and SEQ ID NO:1406; SEQ ID NO:1376 and SEQ ID NO:1383; SEQ ID NO:1182 and SEQ ID NO:1189; SEQ ID NO: 1387 and SEQ ID NO: 1393; SEQ ID NO: 1410 and SEQ ID NO: 1417; SEQ ID NO: 1420 and SEQ ID NO: 1426; SEQ ID NO: 1434 and SEQ ID NO: 1440; SEQ ID NO:1445 and SEQ ID NO:1452; SEQ ID NO: 1455 and SEQ ID NO: 1462; SEQ ID NO: 1470 and SEQ ID NO: 1476; SEQ ID NO: 1480 and SEQ ID NO: 1486; SEQ ID NO: 1490 and SEQ ID NO: 1495; SEQ ID NO: 1503 and SEQ ID NO: 1509; SEQ ID NO: 1513 and SEQ ID NO: 1520; SEQ ID NO: 1527 and SEQ ID NO: 1533; SEQ ID NO: 1541 and SEQ ID NO: 1545; SEQ ID NO: 1549 and SEQ ID NO:1556; SEQ ID NO: 1563 and SEQ ID NO: 1570; SEQ ID NO: 1577 and SEQ ID NO: 1583; or SEQ ID NO: 1588 and SEQ ID NO: 1597.

[0184] The disclosure also describes a heavy and light chain comprising the sequences of SEQ ID NO: 2 and SEQ ID NO: 11; SEQ ID NO:20 and SEQ ID NO:28; SEQ ID NO:37 and SEQ ID NO: 46; SEQ ID NO:55 and SEQ ID NO:62; SEQ ID NO: 71 and SEQ ID NO: 78; SEQ ID NO:87 and SEQ ID NO: 93; SEQ ID NO:99 and SEQ ID NO: 108; SEQ ID NO: 110 and SEQ ID NO: 117; SEQ ID NO: 125 and SEQ ID NO: 133; SEQ ID NO: 140 and SEQ ID NO:149; SEQ ID NO: 155 and SEQ ID NO:163; SEQ ID NO:169 and SEQ ID NO:177; SEQ ID NO: 186 and SEQ ID NO: 193; SEQ ID NO: 198 and SEQ ID NO:206; SEQ ID NO:213 and SEQ ID NO:222; SEQ ID NO: 230 and SEQ ID NO:236; SEQ ID NO:241 and SEQ ID NO:247; SEQ ID NO:255 and SEQ ID NO: 261; SEQ ID NO:269 and SEQ ID NO:275; SEQ ID NO:283 and SEQ ID NO:290; SEQ ID NO: 295 and SEQ ID NO:301; SEQ ID NO:307 and SEQ ID NO:312; SEQ ID NO:320 and SEQ ID NO:327; SEQ ID NO:332 and SEQ ID NO:337; SEQ ID NO:341 and SEQ ID NO:348; SEQ ID NO:357 and SEQ ID NO:364; SEQ ID NO:372 and SEQ ID NO:377; SEQ ID NO:382 and SEQ ID NO:385; SEQ ID NO:391 and SEQ ID NO:395; SEQ ID NO:399 and SEQ ID NO: 402; SEQ ID NO:408 and SEQ ID NO:413; SEQ ID NO:418 and SEQ ID NO:423; SEQ ID NO: 426 and SEQ ID NO:431; SEQ ID NO:436 and SEQ ID NO:440; SEQ ID NO:445 and SEQ ID NO: 451; SEQ ID NO:456 and SEQ ID NO:463; SEQ ID NO:471 and SEQ ID NO:479; SEQ ID NO: 482 and SEQ ID NO:488; SEQ ID NO:496 and SEQ ID NO:501; SEQ ID NO:506 and SEQ ID NO:509; SEQ ID NO:512 and SEQ ID NO:519; SEQ ID NO:526 and SEQ ID NO:534; SEQ ID NO:541 and SEQ ID NO:547; SEQ ID NO:552 and SEQ ID NO:559; SEQ ID NO:562 and SEQ ID NO:569; SEQ ID NO:575 and SEQ ID NO:580; SEQ ID NO:584 and SEQ ID NO: 590; SEQ ID NO:598 and SEQ ID NO:604; SEQ ID NO:609 and SEQ ID NO:616; SEQ ID NO: 621 and SEQ ID NO: 629; SEQ ID NO: 637 and SEQ ID NO: 644; SEQ ID NO:649 and SEQ ID NO: 653; SEQ ID NO:657 and SEQ ID NO:663; SEQ ID NO:666 and SEQ ID NO:672; SEQ ID NO: 678 and SEQ ID NO:685; SEQ ID NO: 692 and SEQ ID NO:697; SEQ ID NO:703 and SEQ ID NO: 707; SEQ ID NO:710 and SEQ ID NO:715; SEQ ID NO:723 and SEQ ID NO:727; SEQ ID NO: 733 and SEQ ID NO: 739; SEQ ID NO: 743 and SEQ ID NO:749; SEQ ID NO: 753 and SEQ ID NO:760; SEQ ID NO:764 and SEQ ID NO: 768; SEQ ID NO:774 and SEQ ID NO: 781; SEQ ID NO: 785 and SEQ ID NO: 793; SEQ ID NO: 797 and SEQ ID NO:803; SEQ ID NO: 808 and SEQ ID NO:815; SEQ ID NO: 820 and SEQ ID NO:825; SEQ ID NO:828 and SEQ ID NO: 836; SEQ ID NO:841 and SEQ ID NO:847; SEQ ID NO:849 and SEQ ID NO:855; SEQ ID NO: 859 and SEQ ID NO:866; SEQ ID NO:874 and SEQ ID NO:880; SEQ ID NO:887 and SEQ ID NO:894; SEQ ID NO: 898 and SEQ ID NO: 903; SEQ ID NO:909 and SEQ ID NO:914; SEQ ID NO:918 and SEQ ID NO:923; SEQ ID NO: 928 and SEQ ID NO:934; SEQ ID NO:939 and SEQ ID NO:946; SEQ ID NO:952 and SEQ ID NO:958; SEQ ID NO:962 and SEQ ID NO: 965; SEQ ID NO:928 and SEQ ID NO: 934; SEQ ID NO: 969 and SEQ ID NO:973; SEQ ID NO: 978 and SEQ ID NO: 985; SEQ ID NO:989 and SEQ ID NO: 994; SEQ ID NO: 999 and SEQ ID NO: 1004; SEQ ID NO:1008 and SEQ ID NO:1016; SEQ ID NO: 1022 and SEQ ID NO:1027; SEQ ID NO: 1031 and SEQ ID NO: 1035; SEQ ID NO: 1041 and SEQ ID NO: 1045; SEQ ID NO: 1048 and SEQ ID NO: 1057; SEQ ID NO: 1061 and SEQ ID NO: 1069; SEQ ID NO: 1075 and SEQ ID NO:1081; SEQ ID NO:1086 and SEQ ID NO:1090; SEQ ID NO:1094 and SEQ ID NO: 1100; SEQ ID NO: 1108 and SEQ ID NO:1114; SEQ ID NO: 1122 and SEQ ID NO:1129; SEQ ID NO:1136 and SEQ ID NO:1141; SEQ ID NO: 1148 and SEQ ID NO:1151; SEQ ID NO: 1156 and SEQ ID NO: 1164; SEQ ID NO: 1170 and SEQ ID NO: 1178; SEQ ID NO: 1183 and SEQ ID NO:1190; SEQ ID NO:1198 and SEQ ID NO: 1201; SEQ ID NO: 1204 and SEQ ID NO: 1210; SEQ ID NO: 1215 and SEQ ID NO: 1221; SEQ ID NO: 1225 and SEQ ID NO: 1231; SEQ ID NO:1234 and SEQ ID NO: 1242; SEQ ID NO: 1248 and SEQ ID NO: 1254; SEQ ID NO: 1257 and SEQ ID NO: 1264; SEQ ID NO: 1204 and SEQ ID NO: 1210; SEQ ID NO: 1271 and SEQ ID NO:1279; SEQ ID NO:1183 and SEQ ID NO: 1190; SEQ ID NO: 1215 and SEQ ID NO: 1221; SEQ ID NO: 1285 and SEQ ID NO: 1292; SEQ ID NO: 1298 and SEQ ID NO: 1305; SEQ ID NO:1310 and SEQ ID NO:1317; SEQ ID NO:1225 and SEQ ID NO: 1231; SEQ ID NO: 1257 and SEQ ID NO: 1264; SEQ ID NO: 1320 and SEQ ID NO: 1328; SEQ ID NO: 1320 and SEQ ID NO:1328; SEQ ID NO: 1271 and SEQ ID NO: 1279; SEQ ID NO: 1285 and SEQ ID NO: 1292; SEQ ID NO: 1334 and SEQ ID NO: 1341; SEQ ID NO: 1349 and SEQ ID NO: 1358; SEQ ID NO:1362 and SEQ ID NO:1365; SEQ ID NO: 1368 and SEQ ID NO: 1201; SEQ ID NO: 1362 and SEQ ID NO: 1365; SEQ ID NO: 1377 and SEQ ID NO: 1384; SEQ ID NO: 1388 and SEQ ID NO:1394; SEQ ID NO:1368 and SEQ ID NO: 1201; SEQ ID NO: 1148 and SEQ ID NO: 1151; SEQ ID NO:1401 and SEQ ID NO:1407; SEQ ID NO:1377 and SEQ ID NO:1384; SEQ ID NO:1183 and SEQ ID NO:1190; SEQ ID NO: 1388 and SEQ ID NO:1394; SEQ ID NO: 1411 and SEQ ID NO: 1418; SEQ ID NO: 1421 and SEQ ID NO: 1427; SEQ ID NO: 1435 and SEQ ID NO:1441; SEQ ID NO: 1446 and SEQ ID NO:1453; SEQ ID NO: 1456 and SEQ ID NO: 1463; SEQ ID NO: 1471 and SEQ ID NO: 1477; SEQ ID NO: 1481 and SEQ ID NO: 1487; SEQ ID NO:1491 and SEQ ID NO: 1496; SEQ ID NO: 1504 and SEQ ID NO: 1510; SEQ ID NO: 1514 and SEQ ID NO: 1521; SEQ ID NO: 1528 and SEQ ID NO: 1534; SEQ ID NO: 1542 and SEQ ID NO:1546; SEQ ID NO:1550 and SEQ ID NO:1557; SEQ ID NO:1564 and SEQ ID NO: 1571; SEQ ID NO: 1578 and SEQ ID NO: 1584; or SEQ ID NO: 1589 and SEQ ID NO: 1598.

[0185] “Treatment” or treating may refer to any treatment of a disease in a mammal, including: (i) preventing the disease, that is, causing the clinical symptoms of the disease not to develop by administration of a protective composition prior to the induction of the disease; (ii) suppressing the disease, that is, causing the clinical symptoms of the disease not to develop by administration of a protective composition after the inductive event but prior to the clinical appearance or reappearance of the disease; (iii) inhibiting the disease, that is, arresting the development of clinical symptoms by administration of a protective composition after their initial appearance; and/or (iv) relieving the disease, that is, causing the regression of clinical symptoms by administration of a protective composition after their initial appearance. The treatment may exclude prevention of the disease.

[0186] Throughout this application, the term “about” is used according to its plain and ordinary meaning in the area of cell and molecular biology to indicate that a value includes the standard deviation of error for the device or method being employed to determine the value.

[0187] The use of the word “a” or “an” when used in conjunction with the term “comprising” may mean “one,” but it is also consistent with the meaning of “one or more,” “at least one,” and “one or more than one.”

[0188] As used herein, the terms “or” and “and/or” are utilized to describe multiple components in combination or exclusive of one another. For example, “x, y, and/or z” can refer to “x” alone, “y” alone, “z” alone, “x, y, and z,” “(x and y) or z,” “x or (y and z),” or “x or y or z.” It is specifically contemplated that x, y, or z may be specifically excluded from an embodiment or aspect.

[0189] The words “comprising” (and any form of comprising, such as “comprise” and “comprises”), “having” (and any form of having, such as “have” and “has”), “including” (and any form of including, such as “includes” and “include”), “characterized by” (and any form of including, such as “characterized as”), or “containing” (and any form of containing, such as “contains” and “contain”) are inclusive or open-ended and do not exclude additional, unrecited elements or method steps.

[0190] The compositions and methods for their use can “comprise,” “consist essentially of,” or “consist of” any of the ingredients or steps disclosed throughout the specification. The phrase “consisting of” excludes any element, step, or ingredient not specified. The phrase “consisting essentially of” limits the scope of described subject matter to the specified materials or steps and those that do not materially affect its basic and novel characteristics. It is contemplated that embodiments and aspects described in the context of the term “comprising” may also be implemented in the context of the term “consisting of” or “consisting essentially of.”

[0191] Any method in the context of a therapeutic, diagnostic, or physiologic purpose or effect may also be described in “use” claim language such as “Use of” any compound, composition, or agent discussed herein for achieving or implementing a described therapeutic, diagnostic, or physiologic purpose or effect.

[0192] Use of the one or more sequences or compositions may be employed based on any of the methods described herein. Other embodiments are discussed throughout this application. Any embodiment or aspect discussed with respect to one aspect of the disclosure applies to other aspects of the disclosure as well and vice versa.

[0193] It is specifically contemplated that any limitation discussed with respect to one embodiment or aspect of the invention may apply to any other embodiment or aspect of the invention. Furthermore, any composition of the invention may be used in any method of the invention, and any method of the invention may be used to produce or to utilize any composition of the invention. Aspects of an embodiment set forth in the Examples are also embodiments that may be implemented in the context of embodiments discussed elsewhere in a different Example or elsewhere in the application, such as in the Summary, Detailed Description, Claims, and description of Figure Legends.

[0194] Other objects, features and advantages of the present invention will become apparent from the following detailed description. It should be understood, however, that the detailed description and the specific examples, while indicating specific embodiments and aspects of the invention, are given by way of illustration only, since various changes and modifications within the spirit and scope of the invention will become apparent to those skilled in the art from this detailed description.

### BRIEF DESCRIPTION OF THE DRAWINGS

[0195] The following drawings form part of the present specification and are included to further demonstrate certain aspects of the present invention. The invention may be better understood by reference to one or more of these drawings in combination with the detailed description of specific embodiments presented herein.

[0196] FIGS. 1A-C. Analyses of serum antibody responses in COVID-19 convalescent individuals. a, b, Total IgG endpoint antibody titers from 10 convalescent subjects against SARS-CoV-2 full-length spike variants (a) and RBD recombinant antigens (b). Dashed line is the mean IgG titer. c, Neutralization titers from 10 convalescent donors against WT SARS-CoV-2, B.1.1.7, P.1, B.1.617.2 and B.1.617.1. Dashed line represents the mean neutralization titer. Data in a-c were analyzed using non-parametric Friedman's test with Dunnett's multiple comparison test. Fold-change in relative mAb binding to variants or mutants compared to WT in a and b are indicated above the statistical asterisks.

[0197] FIGS. 2A-I. a, b, Uniform manifold approximation and projection (UMAP) of SARS-CoV-2 spike non-RBD binding (a) and spike RBD binding B cells (b) isolated from the PBMCs of 10 convalescent subjects. c, The proportion of spike non-RBD and spike RBD specific binding B cells. The number in center of pie chart indicates the number of antigen-specific binding B cells. d, mAbs generated from selected B cells (n=43) were tested for binding to full-length spike, S1, S2, and RBD and neutralization potential against WT SARS-CoV-2. Binding data are represented as area under the curve (AUC). Neutralizing activity less than 10,000 ng/ml are considered neutralizing. e, f, Pie charts of mAbs domain specificity (e) and neutralizing capability (f). Number in the center of pie graphs indicate the number of antibodies tested. g, Comparison of neutralizing capability of mAbs targeting spike RBD and spike non-RBD. h and i, IC50 of neutralization potency of spike-reactive antibodies against WT virus based on domain specificity (h) and by subject (i). Mean in h indicated as a solid line. Dashed lines shown in h and i indicate limit of detection (10,000 ng/mL). Data in d-i are representative of two independent experiment performed in duplicate. Genetic characterization of each mAb is further detailed in Extended Data Table 2 (Example 1).

[0198] FIG. 3A-H. Binding breadth and neutralization of spike non-RBD mAbs. a, Full-length spike protein binding to ACE2 (a; PDB: 7KJ2). b-g, Locations of mutations found on B.1.1.7 (b), B.1.351 (c), P.1 (d), B.1.617.2 (e), B.1.526 (f) and B.1.617.1 (g). (b-g; modified from PDB: 6XM4). h, The binding reactivity and neutralization capabilities of NTA-A, NTD-B and S2 reactive mAbs. The color gradients indicate percentage of relative binding compared to WT spike. The neutralization potency (IC50) of spike-non RBD mAbs against WT, B.1.1.7, P.1, B.1.617.2 and B.1.617.1 variants are indicated as ng/ml. The panel of SARS-CoV-2 viruses are detailed in Extended Data Table 4 (Example 1). Data in h are representative of two independent experiments performed in duplicate. Genetic information for each mAb is in Extended Data Table 2 (Example 1).

[0199] FIG. 4A-C. Binding and neutralization profiles of RBD-binding 2 mAbs against a panel of RBD escape mutants and variants. a, Structural model of RBD “up” binding with ACE2 (a; PDB: 7KJ2) and RBD antibody classes and associated escape mutants. b, RBD is colored by antibody classes and associated mutations. c, Heatmap detailing binding reactivity of RBD mAbs (n=29) against single key escape sites for class 1, class 2 and class 3 antibodies, combinations of RBD mutants, and RBD from SARS-CoV-1 and MERS-CoV. Abbreviation of a refers to class-3 like antibodies, which are defined by mAbs that compete with a class 3 mAb (Extended Data FIG. 2c). Abbreviations b-f refer to mutations in the RBD of each full length spike variant, B.1.1.7 with N501Y (b), B.1.351 with K417N:E484K:N501Y (c), P.1 with K417T:E484K:N501Y (d), B.1.617.2 with T478K: L452R (e), B.1.526 with E484K (f) and B.1.617.1 with L452R:E484Q (g). The panel of recombinant antigens in c are detailed in Extended Data Table 3 (Example 1), including mutations found in circulating SARS-CoV-2 variants (bold), the mutations that escape/reduce binding by polyclonal serum/potent neutralizing mAbs (italic), the mutations found in both circulating SARS-CoV-2 variants and in vitro escape-map (bold+italic), and artificial mutants at key contact residues of the RBD-ACE2 interaction (normal typeface). The neutralization potency (IC50) of spike-RBD mAbs against WT, B.1.1.7, P.1, B.1.617.2 and B.1.617.1 variants are indicated as ng/ml. The panel of SARS-CoV-2 viruses are detailed in Extended Data Table 4 (Example 1). Data in c are representative of two independent experiments performed in duplicate. Genetic information for each antibody is in Extended Data Table 2 (Example 1).

[0200] FIG. 5A-I. MAb genetic, somatic hypermutation, and CDR3 length features. a-d, The distribution of V gene usage of spike-non RBD and spike RBD antibodies for all paired heavy (a, c) and light (b, d) chains. Percentage shown indicates proportion of the top 3 utilized genes. e, Clonal relationships between heavy and light chain variable gene locus of spike non-RBD and spike RBD-specific antibodies. Connecting lines represent the pairing of heavy and light chain of antibody clones specific to spike non-RBD or RBD and antibody clones shared between both groups (purple). f, g, Comparison of number of somatic hypermutations of heavy (f) and light chains (g) of spike non-RBD and spike RBD-binding B cells. h and i, The complementarity determining region 3 (CDR3) amino acid length for heavy (h) and light chains (i) of spike non-RBD and spike RBD-binding B cells. Median indicated as line in the box and whisker graph. Each dot represents an individual antibody with range from minimum to maximum value. Data in f-i were analyzed using Mann-Whitney non-parametric test.

[0201] FIG. 6A-E. MAb binding competition by ELISA and BLI and serum competition by ELISA. a, Competition ELISA of RBD mAbs of spike non-RBD mAbs with NTD-A (S451-11) and NTD-B (S305-1456). b, Competition ELISA of RBD mAbs of undetermined class with class 2 mAbs (S144-1079 and S564-138) and class 3 mAb (S24-821). c, MAb binding competition by BLI of class 2 mAb, S144-1406, with the other class 2 mAbs (n=4) that did not neutralize P.1. d, MAb binding competition by BLI between class 4 mAbs that utilized VH5-51 (S144-466, S144-509, S144 and S144-69) with CR3022. e, EC50 of serum antibodies of 10 convalescent subjects competing with RBD-reactive mAbs for binding to RBD class 2, class 3 and class 3-like epitopes, and NTD-reactive mAbs for binding to NTD-B epitopes. Dashed line represents the limit of detection. Data in a-b and e are representative of two independent experiments performed in duplicate. Data in e were analyzed using nonparametric Friedman's test with Dunn's multiple comparison test.

[0202] FIG. 7A-B. Comparison of neutralization potency of SARS-CoV-2 neutralizing mAbs. a, Neutralization potency (IC50) of RBD-binding mAbs, class 2 and class 3, and NTD-B binding mAbs against WT SARS-CoV-2. b, Neutralization potency of each mAb from each subject against WT SARS-CoV-2, B.1.1.7, P.1, B.1.617.1 and B.1.617.2. Each dot indicates one mAb. MAbs that neutralize VOCs are bolded. Data in a-c are representative of two independent experiments performed in duplicate. Data in a were analyzed using Mann-Whitney non-parametric test.

[0203] FIG. 8A-K. Proportion of SARS-CoV-2-specific B cells and characterization of RBD-reactive mAbs isolated from COVID-19 convalescent individuals. a-b, Uniform manifold approximation and projection (UMAP) of SARS-CoV-2 (a) spike RBD binding and (b) spike non-RBD binding B cells isolated from convalescent subjects that could be characterized into 3 groups (high, mid and low responder) based on their serological response against SARS-CoV-2 spike. c, Proportion of spike non-RBD- and spike RBD-specific binding B cells representing in each responder group. d-e, Number of somatic hypermutations in the IGHV in antibodies targeting (d) RBD and (e) non-RBD. f, Binding profile of RBD-reactive mAbs against single RBD mutants associated with different antibody classes, a combinatorial RBD mutant, and the RBDs of SARS-CoV-1 and MERS-CoV. Color gradients indicate relative binding percentage compared to spike WT g, Neutralization potency measured by plaque assay (complete inhibitory concentration; IC99) and focus reduction neutralization test (FRNT; half inhibitory concentration; IC50) of RBD-reactive mAbs to SARS-CoV-2 variants and sarbecoviruses. Binding breadth against full-length spike SARS-CoV-2 variants determined by ELISA is shown for (h) S728-1157, (i) S451-1140, and (j) S626-161. k, Heatmap represents area under curve (AUC) fold-change of broadly neutralizing RBD-reactive mAbs against ectodomain spike SARS-CoV-2 variants relative to WT-2P and the differences of AUC fold-change between spike BA.1-2P relative to spike BA.1-6P. The statistical analysis in d-e was determined using Kruskal-Wallis with Dunn's multiple comparison test. Data in f-g and h-j are representative of two independent experiments performed in duplicate. Genetic information for each antibody is in Table S2 (Example 2). The SARS-CoV-2 viruses used in neutralization assay are indicated in Table S4 (Example 2).

[0204] FIG. 9A-D: Mechanism of broad neutralization of S728-1157. (a) Epitope binning of broadly neutralizing RBD-reactive mAbs. Heatmap demonstrating the percentage of competition between each RBD-reactive mAb from previous studies with three broadly neutralizing mAbs, S728-1157, S451-1140 and S626-161. Data are representative of two independent experiments performed in triplicate. (b) Surface representation of the model derived from the cryoEM map of spike WT-6P-Mut7 in complex with IgG S728-1157. Although the inventors observe full mAb occupancy in the cryo-EM map, only one Fv is shown here. (c) Structural comparison of S728-1157 to other RBS-A antibodies such as CC12.1 (PDB ID: 6XC2), CC12.3 (PDB ID: 6XC4), B38 (PDB ID: 7BZ5), and C105 (PDB ID: 6XCN). The heavy chains are a darker shade, and the light chains are a lighter shade. Omicron BA.1 mutations near the epitope interface are shown as spheres. (d) CDR-H3 forms distinct interactions with SARS-CoV-2 RBD between S728-1157 and CC12.3. Sequence alignment of CDR-H3 of the two antibodies are shown in the middle with non-conserved residues.

[0205] FIG. 10A-G: Protective efficacy of broadly neutralizing antibodies against SARS-CoV-2 infection in hamster. Schematic illustrating the in vivo experiment schedule (a). Lung and nasal turbinate (NT) viral replication SARS-CoV-2 are shown for hamster treated therapeutically with (b-d) S728-1157 (n=3) (e) S451-1140 (n=3) and (f-g) S626-161 (n=4) at day 4 post-challenge with SARS-CoV-2 compared with control mAb, anti-Ebola surface glycoprotein (KZ52) antibody. Dashed horizontal lines represent the limit of detection (LOD) of the experiment. P-values in (b-g) were calculated using Unpaired t-test. The infected SARS-CoV-2 viruses are detailed in Table S4 (Example 2).

[0206] FIG. 11A-K: Convalescent serum antibody competition with broadly neutralizing RBD-reactive mAbs and comparison of serum antibody response against spike 6P-versus 2P-stabilized. Schematic diagram for experimental procedure of serum competitive ELISA (a). Half-maximal inhibitory concentration (EC50) of polyclonal antibody serum from convalescent individuals that could compete with broadly neutralizing mAbs (competitor mAb): S728-1157 (b), S451-1140 (c) and S626-161 (d), therapeutic neutralizing mAbs LY-CoV555 (e), REGN-10933 (f), non-neutralizing mAb CR3022 (g) and well-defined class 1 mAb CC12.3 (h). The reciprocal serum dilutions in b-h are showed as Log 1P of the IC50 of serum dilution that can achieve 50% competition with the competitor mAb of interest. The statistical analysis in b-h was determined using Kruskal-Wallis with Dunn's multiple comparison test. Representative three conformations of pre-fusion spike trimer antigen observed in the previous structural characterization of SARS-CoV-2 stabilized by 2P and 6P31,47 (i). Endpoint titer of convalescent sera against SARS-CoV-2 spike wildtype (WT) (j) and Omicron BA.1 (k) in two versions of spike substituted by 2P and 6P. Data in b-h and j-k are representative of two independent experiments performed in duplicate. Wilcoxon matched-pairs signed rank test was used to compare the anti-spike antibody titer against 2P and 6P in j-k. Fold change indicated in j-k is defined as the mean fold change.

[0207] FIG. 12: Amino acid and nucleotide sequences of complementarity-determining region (CDR) of heavy chain and light chain of the three bnAbs. Contacting residues within CDR of S728-1157 and SARS-CoV-2 are highlighted as light grey. Genetic information for each antibody is in Table S2 (Example 2). The sequences in the figure correspond to SEQ ID NO: 1883 (S728-1157 heavy chain amino acid sequence), SEQ ID NO:1884 (S728-1157 heavy chain nucleotide sequence), SEQ ID NO:1885 (S728-1157 light chain amino acid sequence), SEQ ID NO:1886 (S728-1157 light chain nucleotide sequence), SEQ ID NO: 1887 (S451-1140 heavy chain amino acid sequence), SEQ ID NO:1888 (S451-1140 heavy chain nucleotide sequence), SEQ ID NO: 1889 (S451-1140 light chain amino acid sequence), SEQ ID NO: 1890 (S451-1140 light chain nucleotide sequence), SEQ ID NO: 1891 (S626-161 heavy chain amino acid sequence), SEQ ID NO: 1892 (S626-161 heavy chain nucleotide sequence), SEQ ID NO: 1893 (S626-161 light chain amino acid sequence), and SEQ ID NO: 1894 (S626-161 light chain nucleotide sequence).

[0208] FIG. 13A-D: Broadly neutralizing RBD-reactive mAbs activity against SARS-CoV-2 and emerging variants. a, Structural models for the full-length spike protein variants and amino acid substitutions that encoded in B.1.1.7 Alpha, B.1.351 Beta, P.1 Gamma, B.1.617.2 Delta and Omicron, BA.1, BA.2 and BA.4. The structural models in a are modified from PDB ID: 6XM4. b, The table illustrating the binding rate and equilibrium constants (kₒₙ, k_{off}, and affinity binding K_{D}) measured by BLI of S728-1157, S451-1140 and S626-161 IgG in response to the panel of SARS-CoV-2 VOCs (either former or current VOCs). c, The binding rate comparison of Fabs of S728-1157, S451-1140 and S626-161 in responding to spike WT-6P and 2P constructs. The binding traces of IgG and Fab analyzed by BLI were represented by the 1:2 and 1:1 interaction model, respectively. d, The fold-change of binding rate (Kₒₙ, K_{off}) and binding affinity (K_{D}) between spike WT-6P and spike WT-2P bound by broadly neutralizing RBD-reactive mAbs, whole IgG form and Fab. Data in c-d are representative of two independent experiments, the data from experiments that have the best fit (R²>0.90) are selected for analysis.

[0209] FIG. 14A-F: Biolayer interferometry analysis demonstrates binding affinity curves of three broadly neutralizing mAbs competing with each other in response to biotinylated spike wildtype (WT)-6P (left panel) and spike BA.1 Omicron-6P (right panel). a-b, S626-161 was firstly bound, followed by S728-1157 mAb as competing mAb. c-d, S451-1140 was firstly bound and competed with S728-1157 and e-f, S626-161. The response curve was normalized in relation to its starting response value.

[0210] FIG. 15A-E. Structural analysis of S728-1157 binding to SARS-CoV-2 spike. (a) Three-dimensional (3D) reconstruction of Omicron BA.1-6P in complex with IgG S728-1157 shows binding by negative stain electron microscopy. The binding mode is the same as binding to spike WT-6P-Mut7 shown in FIG. 2b. (b) CDR-H1 of S728-1157 forms similar interactions with SARS-CoV-2 RBD compared to another IGHV3-53 antibody CC12.3 (PDB ID: 6XC4). (c) CDR-H2 of S728-1157 forms similar interactions with the RBD compared to CC12.3 (PDB ID: 6XC4). (d) For spike WT-6P-Mut7 in complex with S728-1157, residues Y505 and V_{L} Q31, and E484 and V_{L} Y99 are predicted to make hydrogen bonds. Hydrophobic residues Y486 and Y489 are shown as well. Since S728-1157 binds spike Omicron BA.1-6P in the same way as to spike WT-6P-Mut7, it may accommodate the E484A and Y505H mutations in Omicron. (e) Local resolution estimates of the cryo-EM map (upper panel) and local refinement on the RBD-Fv after symmetry expansion using RELION (lower panel).

### DETAILED DESCRIPTION

[0211] Several severe acute respiratory syndrome coronavirus 2 (SARS-CoV-2) variants have arisen that exhibit increased viral transmissibility and partial evasion of immunity induced by natural infection and vaccination. To address the specific antibody targets that were affected by recent viral variants, the inventors generated monoclonal antibodies (mAbs) from 10 convalescent donors that bound three distinct domains of the SARS-CoV-2 spike. Viral variants harboring mutations at K417, E484 and N501 could escape most of the highly potent antibodies against the receptor binding domain (RBD). Despite this, they identified neutralizing mAbs against three distinct regions of the spike protein that neutralize SARS-CoV-2 and the variants of concern, including B.1.1.7 (alpha), P.1 (gamma) and B.1.617.2 (delta). Notably, antibodies targeting distinct epitopes could neutralize discrete variants, suggesting different variants may have evolved to disrupt the binding of particular neutralizing antibody classes. These results underscore that humans exposed to first pandemic wave of prototype SARS-CoV-2 do possess neutralizing antibodies against current variants and that it is critical to induce antibodies targeting multiple distinct epitopes of the spike that can neutralize emerging variants of concern.

### I. Antibodies

[0212] The disclosure relates to antibodies, antigen binding fragments thereof, or polypeptides capable of specifically binding to a SARS-CoV-2 spike(S) protein, NP protein, or ORF8. Also described are antibodies, or fragments thereof, that specifically bind to a receptor binding domain (RBD) of a SARS-CoV-2 spike protein.

[0213] The term “antibody” refers to an intact immunoglobulin of any isotype, or a fragment thereof that can compete with the intact antibody for specific binding to the target antigen, and includes chimeric, humanized, fully human, and bispecific antibodies. As used herein, the terms “antibody” or “immunoglobulin” are used interchangeably and refer to any of several classes of structurally related proteins that function as part of the immune response of an animal, including IgG, IgD, IgE, IgA, IgM, and related proteins, as well as polypeptides comprising antibody CDR domains that retain antigen-binding activity.

[0214] The term “antigen” refers to a molecule or a portion of a molecule capable of being bound by a selective binding agent, such as an antibody. An antigen may possess one or more epitopes that are capable of interacting with different antibodies.

[0215] The term “epitope” includes any region or portion of molecule capable eliciting an immune response by binding to an immunoglobulin or to a T-cell receptor. Epitope determinants may include chemically active surface groups such as amino acids, sugar side chains, phosphoryl or sulfonyl groups, and may have specific three-dimensional structural characteristics and/or specific charge characteristics. Generally, antibodies specific for a particular target antigen will preferentially recognize an epitope on the target antigen within a complex mixture.

[0216] The epitope regions of a given polypeptide can be identified using many different epitope mapping techniques are well known in the art, including: x-ray crystallography, nuclear magnetic resonance spectroscopy, site-directed mutagenesis mapping, protein display arrays, see, e.g., Epitope Mapping Protocols, (Johan Rockberg and Johan Nilvebrant, Ed., 2018) Humana Press, New York, N.Y. Such techniques are known in the art and described in, e.g., U.S. Pat. No. 4,708,871; Geysen et al. Proc. Natl. Acad. Sci. USA 81:3998-4002 (1984); Geysen et al. Proc. Natl. Acad. Sci. USA 82:178-182 (1985); Geysen et al. Molec. Immunol. 23:709-715 (1986). Additionally, antigenic regions of proteins can also be predicted and identified using standard antigenicity and hydropathy plots.

[0217] The term “immunogenic sequence” means a molecule that includes an amino acid sequence of at least one epitope such that the molecule is capable of stimulating the production of antibodies in an appropriate host. The term “immunogenic composition” means a composition that comprises at least one immunogenic molecule (e.g., an antigen or carbohydrate).

[0218] An intact antibody is generally composed of two full-length heavy chains and two full-length light chains, but in some instances may include fewer chains, such as antibodies naturally occurring in camelids that may comprise only heavy chains. Antibodies as disclosed herein may be derived solely from a single source or may be “chimeric,” that is, different portions of the antibody may be derived from two different antibodies. For example, the variable or CDR regions may be derived from a rat or murine source, while the constant region is derived from a different animal source, such as a human. The antibodies or binding fragments may be produced in hybridomas, by recombinant DNA techniques, or by enzymatic or chemical cleavage of intact antibodies. Unless otherwise indicated, the term “antibody” includes derivatives, variants, fragments, and muteins thereof, examples of which are described below (Sela-Culang et al., Front Immunol. 2013; 4:302; 2013).

[0219] The term “light chain” includes a full-length light chain and fragments thereof having sufficient variable region sequence to confer binding specificity. A full-length light chain has a molecular weight of around 25,000 Daltons and includes a variable region domain (abbreviated herein as VL), and a constant region domain (abbreviated herein as CL). There are two classifications of light chains, identified as kappa (κ) and lambda (2). The term “VL fragment” means a fragment of the light chain of a monoclonal antibody that includes all or part of the light chain variable region, including CDRs. A VL fragment can further include light chain constant region sequences. The variable region domain of the light chain is at the amino-terminus of the polypeptide.

[0220] The term “heavy chain” includes a full-length heavy chain and fragments thereof having sufficient variable region sequence to confer binding specificity. A full-length heavy chain has a molecular weight of around 50,000 Daltons and includes a variable region domain (abbreviated herein as VH), and three constant region domains (abbreviated herein as CH1, CH2, and CH3). The term “VH fragment” means a fragment of the heavy chain of a monoclonal antibody that includes all or part of the heavy chain variable region, including CDRs. A VH fragment can further include heavy chain constant region sequences. The number of heavy chain constant region domains will depend on the isotype. The VH domain is at the amino-terminus of the polypeptide, and the CH domains are at the carboxy-terminus, with the CH3 being closest to the —COOH end. The isotype of an antibody can be IgM, IgD, IgG, IgA, or IgE and is defined by the heavy chains present of which there are five classifications: mu (μ), delta (δ), gamma (γ), alpha (α), or epsilon (ε) chains, respectively. IgG has several subtypes, including, but not limited to, IgG1, IgG2, IgG3, and IgG4. IgM subtypes include IgM1 and IgM2. IgA subtypes include IgA1 and IgA2.

### A. Types of Antibodies

[0221] Antibodies can be whole immunoglobulins of any isotype or classification, chimeric antibodies, or hybrid antibodies with specificity to two or more antigens. They may also be fragments (e.g., F(ab′)2, Fab′, Fab, Fv, and the like), including hybrid fragments. An immunoglobulin also includes natural, synthetic, or genetically engineered proteins that act like an antibody by binding to specific antigens to form a complex. The term antibody includes genetically engineered or otherwise modified forms of immunoglobulins.

[0222] The term “monomer” means an antibody containing only one Ig unit. Monomers are the basic functional units of antibodies. The term “dimer” means an antibody containing two Ig units attached to one another via constant domains of the antibody heavy chains (the Fc, or fragment crystallizable, region). The complex may be stabilized by a joining (J) chain protein. The term “multimer” means an antibody containing more than two Ig units attached to one another via constant domains of the antibody heavy chains (the Fc region). The complex may be stabilized by a joining (J) chain protein.

[0223] The term “bivalent antibody” means an antibody that comprises two antigen-binding sites. The two binding sites may have the same antigen specificities or they may be bi-specific, meaning the two antigen-binding sites have different antigen specificities.

[0224] Bispecific antibodies are a class of antibodies that have two paratopes with different binding sites for two or more distinct epitopes. Bispecific antibodies can be biparatopic, wherein a bispecific antibody may specifically recognize a different epitope from the same antigen. Bispecific antibodies can be constructed from a pair of different single domain antibodies termed “nanobodies”. Single domain antibodies are sourced and modified from cartilaginous fish and camelids. Nanobodies can be joined together by a linker using techniques typical to a person skilled in the art; such methods for selection and joining of nanobodies are described in PCT Publication No. WO2015044386A1, No. WO2010037838A2, and Bever et al., Anal Chem. 86:7875-7882 (2014), each of which are specifically incorporated herein by reference in their entirety.

[0225] Bispecific antibodies can be constructed as: a whole IgG, Fab′2, Fab′PEG, a diabody, or alternatively as scFv. Diabodies and scFvs can be constructed without an Fc region, using only variable domains, potentially reducing the effects of anti-idiotypic reaction. Bispecific antibodies may be produced by a variety of methods including, but not limited to, fusion of hybridomas or linking of Fab′ fragments. See, e.g., Songsivilai and Lachmann, Clin. Exp. Immunol. 79:315-321 (1990); Kostelny et al., J. Immunol. 148:1547-1553 (1992), each of which are specifically incorporated by reference in their entirety.

[0226] The antigen-binding domain may be multispecific or heterospecific by multimerizing with VH and VL region pairs that bind a different antigen. For example, the antibody may bind to, or interact with, (a) a cell surface antigen, (b) an Fc receptor on the surface of an effector cell, or (c) at least one other component. Accordingly, included are bispecific, trispecific, tetraspecific, and other multispecific antibodies or antigen-binding fragments thereof that are directed to epitopes and to other targets, such as Fc receptors on effector cells.

[0227] Multispecific antibodies can be used and directly linked via a short flexible polypeptide chain, using routine methods known in the art. One such example is diabodies that are bivalent, bispecific antibodies in which the VH and VL domains are expressed on a single polypeptide chain, and utilize a linker that is too short to allow for pairing between domains on the same chain, thereby forcing the domains to pair with complementary domains of another chain creating two antigen binding sites. The linker functionality is applicable for triabodies, tetrabodies, and higher order antibody multimers. (see, e.g., Hollinger et al., Proc Natl. Acad. Sci. USA 90:6444-6448 (1993); Polijak et al., Structure 2:1121-1123 (1994); Todorovska et al., J. Immunol. Methods 248:47-66 (2001)).

[0228] Bispecific diabodies, as opposed to bispecific whole antibodies, may also be advantageous because they can be readily constructed and expressed in E. coli. Diabodies (and other polypeptides such as antibody fragments) of appropriate binding specificities can be readily selected using phage display (WO94/13804) from libraries. If one arm of the diabody is kept constant, for instance, with a specificity directed against a protein, then a library can be made where the other arm is varied and an antibody of appropriate specificity selected. Bispecific whole antibodies may be made by alternative engineering methods as described in Ridgeway et al., (Protein Eng., 9:616-621, 1996) and Krah et al., (N Biotechnol. 39:167-173, 2017), each of which is hereby incorporated by reference in their entirety.

[0229] Heteroconjugate antibodies are composed of two covalently linked monoclonal antibodies with different specificities. See, e.g., U.S. Pat. No. 6,010,902, incorporated herein by reference in its entirety.

[0230] The part of the Fv fragment of an antibody molecule that binds with high specificity to the epitope of the antigen is referred to herein as the “paratope.” The paratope consists of the amino acid residues that make contact with the epitope of an antigen to facilitate antigen recognition. Each of the two Fv fragments of an antibody is composed of the two variable domains, VH and VL, in dimerized configuration. The primary structure of each of the variable domains includes three hypervariable loops separated by, and flanked by, Framework Regions (FR). The hypervariable loops are the regions of highest primary sequences variability among the antibody molecules from any mammal. The term hypervariable loop is sometimes used interchangeably with the term “Complementarity Determining Region (CDR).” The length of the hypervariable loops (or CDRs) varies between antibody molecules. The framework regions of all antibody molecules from a given mammal have high primary sequence similarity/consensus. The consensus of framework regions can be used by one skilled in the art to identify both the framework regions and the hypervariable loops (or CDRs) which are interspersed among the framework regions. The hypervariable loops are given identifying names which distinguish their position within the polypeptide, and on which domain they occur. CDRs in the VL domain are identified as L1, L2, and L3, with L1 occurring at the most distal end and L3 occurring closest to the CL domain. The CDRs may also be given the names CDR-L1, CDR-L2, and CDR-L3. The L3 (CDR-L3) is generally the region of highest variability among all antibody molecules produced by a given organism. The CDRs are regions of the polypeptide chain arranged linearly in the primary structure, and separated from each other by Framework Regions. The amino terminal (N-terminal) end of the VL chain is named FR1. The region identified as FR2 occurs between L1 and L2 hypervariable loops. FR3 occurs between L2 and L3 hypervariable loops, and the FR4 region is closest to the CL domain. This structure and nomenclature is repeated for the VH chain, which includes three CDRs identified as CDR-H1, CDR-H2 and CDR-H3. The majority of amino acid residues in the variable domains, or Fv fragments (VH and VL), are part of the framework regions (approximately 85%). The three dimensional, or tertiary, structure of an antibody molecule is such that the framework regions are more internal to the molecule and provide the majority of the structure, with the CDRs on the external surface of the molecule.

[0231] Several methods have been developed and can be used by one skilled in the art to identify the exact amino acids that constitute each of these regions. This can be done using any of a number of multiple sequence alignment methods and algorithms, which identify the conserved amino acid residues that make up the framework regions, therefore identifying the CDRs that may vary in length but are located between framework regions. Three commonly used methods have been developed for identification of the CDRs of antibodies: Kabat (as described in T. T. Wu and E. A. Kabat, “AN ANALYSIS OF THE SEQUENCES OF THE VARIABLE REGIONS OF BENCE JONES PROTEINS AND MYELOMA LIGHT CHAINS AND THEIR IMPLICATIONS FOR ANTIBODY COMPLEMENTARITY,” J Exp Med, vol. 132, no. 2, pp. 211-250, August 1970); Chothia (as described in C. Chothia et al., “Conformations of immunoglobulin hypervariable regions,” Nature, vol. 342, no. 6252, pp. 877-883, December 1989); and IMGT (as described in M.-P. Lefranc et al., “IMGT unique numbering for immunoglobulin and T cell receptor variable domains and Ig superfamily V-like domains,” Developmental & Comparative Immunology, vol. 27, no. 1, pp. 55-77, January 2003). These methods each include unique numbering systems for the identification of the amino acid residues that constitute the variable regions. In most antibody molecules, the amino acid residues that actually contact the epitope of the antigen occur in the CDRs, although in some cases, residues within the framework regions contribute to antigen binding.

[0232] One skilled in the art can use any of several methods to determine the paratope of an antibody. These methods include:
[0233] 1) Computational predictions of the tertiary structure of the antibody/epitope binding interactions based on the chemical nature of the amino acid sequence of the antibody variable region and composition of the epitope.
[0234] 2) Hydrogen-deuterium exchange and mass spectroscopy
[0235] 3) Polypeptide fragmentation and peptide mapping approaches in which one generates multiple overlapping peptide fragments from the full length of the polypeptide and evaluates the binding affinity of these peptides for the epitope.
[0236] 4) Antibody Phage Display Library analysis in which the antibody Fab fragment encoding genes of the mammal are expressed by bacteriophage in such a way as to be incorporated into the coat of the phage. This population of Fab expressing phage are then allowed to interact with the antigen which has been immobilized or may be expressed in by a different exogenous expression system. Non-binding Fab fragments are washed away, thereby leaving only the specific binding Fab fragments attached to the antigen. The binding Fab fragments can be readily isolated and the genes which encode them determined. This approach can also be used for smaller regions of the Fab fragment including Fv fragments or specific VH and VL domains as appropriate.

[0237] Affinity matured antibodies may be enhanced with one or more modifications in one or more CDRs thereof that result in an improvement in the affinity of the antibody for a target antigen as compared to a parent antibody that does not possess those alteration(s). Certain affinity matured antibodies will have nanomolar or picomolar affinities for the target antigen. Affinity matured antibodies are produced by procedures known in the art, e.g., Marks et al., Bio/Technology 10:779 (1992) describes affinity maturation by VH and VL domain shuffling, random mutagenesis of CDR and/or framework residues employed in phage display is described by Rajpal et al., PNAS. 24:8466-8471 (2005) and Thie et al., Methods Mol Biol. 525:309-22 (2009) in conjugation with computation methods as demonstrated in Tiller et al., Front. Immunol. 8:986 (2017).

[0238] Chimeric immunoglobulins are the products of fused genes derived from different species; “humanized” chimeras generally have the framework region (FR) from human immunoglobulins and one or more CDRs are from a non-human source.

[0239] Portions of the heavy and/or light chain may be identical or homologous to corresponding sequences from another particular species or belonging to a particular antibody class or subclass, while the remainder of the chain(s) is identical or homologous to corresponding sequences in antibodies derived from another species or belonging to another antibody class or subclass, as well as fragments of such antibodies, so long as they exhibit the desired biological activity. U.S. Pat. No. 4,816,567; and Morrison et al., Proc. Natl. Acad. Sci. USA 81:6851 (1984). For methods relating to chimeric antibodies, see, e.g., U.S. Pat. No. 4,816,567; and Morrison et al., Proc. Natl. Acad. Sci. USA 81:6851-6855 (1985), each of which are specifically incorporated herein by reference in their entirety. CDR grafting is described, for example, in U.S. Pat. Nos. 6,180,370, 5,693,762, 5,693,761, 5,585,089, and 5,530,101, which are all hereby incorporated by reference for all purposes.

[0240] Minimizing the antibody polypeptide sequence from the non-human species may optimize chimeric antibody function and reduce immunogenicity. Specific amino acid residues from non-antigen recognizing regions of the non-human antibody are modified to be homologous to corresponding residues in a human antibody or isotype. One example is the “CDR-grafted” antibody, in which an antibody comprises one or more CDRs from a particular species or belonging to a specific antibody class or subclass, while the remainder of the antibody chain(s) is identical or homologous to a corresponding sequence in antibodies derived from another species or belonging to another antibody class or subclass. For use in humans, the V region composed of CDR1, CDR2, and partial CDR3 for both the light and heavy chain variance region from a non-human immunoglobulin, are grafted with a human antibody framework region, replacing the naturally occurring antigen receptors of the human antibody with the non-human CDRs. In some instances, corresponding non-human residues replace framework region residues of the human immunoglobulin. Furthermore, humanized antibodies may comprise residues that are not found in the recipient antibody or in the donor antibody to further refine performance. The humanized antibody may also comprise at least a portion of an immunoglobulin constant region (Fc), typically that of a human immunoglobulin. See, e.g., Jones et al., Nature 321:522 (1986); Riechmann et al., Nature 332:323 (1988); Presta, Curr. Op. Struct. Biol. 2:593 (1992); Vaswani and Hamilton, Ann. Allergy, Asthma and Immunol. 1:105 (1998); Harris, Biochem. Soc. Transactions 23; 1035 (1995); Hurle and Gross, Curr. Op. Biotech. 5:428 (1994); Verhoeyen et al., Science 239:1534-36 (1988).

[0241] Intrabodies are intracellularly localized immunoglobulins that bind to intracellular antigens as opposed to secreted antibodies, which bind antigens in the extracellular space.

[0242] Polyclonal antibody preparations typically include different antibodies against different determinants (epitopes). In order to produce polyclonal antibodies, a host, such as a rabbit or goat, is immunized with the antigen or antigen fragment, generally with an adjuvant and, if necessary, coupled to a carrier. Antibodies to the antigen are subsequently collected from the sera of the host. The polyclonal antibody can be affinity purified against the antigen rendering it monospecific.

[0243] Monoclonal antibodies or “mAb” refer to an antibody obtained from a population of homogeneous antibodies from an exclusive parental cell, e.g., the population is identical except for naturally occurring mutations that may be present in minor amounts. Each monoclonal antibody is directed against a single antigenic determinant.

### B. Functional Antibody Fragments and Antigen-Binding Fragments

### 1. Antigen-Binding Fragments

[0244] The disclosure provides for antibody fragments, such as antibody fragments that bind to a SARS-CoV-2 spike protein. The term functional antibody fragment includes antigen-binding fragments of an antibody that retain the ability to specifically bind to an antigen. These fragments are constituted of various arrangements of the variable region heavy chain (VH) and/or light chain (VL); and may include constant region heavy chain 1 (CH1) and light chain (CL). They may also lack the Fc region constituted of heavy chain 2 (CH2) and 3 (CH3) domains. Antigen binding fragments and the modifications thereof may include: (i) the Fab fragment type constituted with the VL, VH, CL, and CH1 domains; (ii) the Fd fragment type constituted with the VH and CH1 domains; (iii) the Fv fragment type constituted with the VH and VL domains; (iv) the single domain fragment type, dAb, (Ward, 1989; McCafferty et al., 1990; Holt et al., 2003) constituted with a single VH or VL domain; (v) isolated complementarity determining region (CDR) regions. Such terms are described, for example, in Harlow and Lane, Antibodies: A Laboratory Manual, Cold Spring Harbor Laboratory, NY (1989); Molec. Biology and Biotechnology: A Comprehensive Desk Reference (Myers, R. A. (ed.), New York: VCH Publisher, Inc.); Huston et al., Cell Biophysics, 22:189-224 (1993); Pluckthun and Skerra, Meth. Enzymol., 178:497-515 (1989) and in Day, E. D., Advanced Immunochemistry, 2d ed., Wiley-Liss, Inc. New York, N.Y. (1990); Antibodies, 4:259-277 (2015), each of which are incorporated by reference.

[0245] Antigen-binding fragments also include fragments of an antibody that retain exactly, at least, or at most 1, 2, or 3 complementarity determining regions (CDRs) from a light chain variable region. Fusions of CDR-containing sequences to an Fc region (or a CH2 or CH3 region thereof) are included within the scope of this definition including, for example, scFv fused, directly or indirectly, to an Fc region are included herein.

[0246] The term Fab fragment (also “Fab”) means a monovalent antigen-binding fragment of an antibody containing the VL, VH, CL and CH1 domains. The term Fab′ fragment means a monovalent antigen-binding fragment of a monoclonal antibody that is larger than a Fab fragment. For example, a Fab′ fragment includes the VL, VH, CL and CH1 domains and all or part of the hinge region. The term F(ab′)2 fragment means a bivalent antigen-binding fragment of a monoclonal antibody comprising two Fab′ fragments linked by a disulfide bridge at the hinge region. An F(ab′)2 fragment includes, for example, all or part of the two VH and VL domains, and can further include all or part of the two CL and CH1 domains.

[0247] The term Fd fragment means a fragment of the heavy chain of a monoclonal antibody, which includes all or part of the VH, including the CDRs. An Fd fragment can further include CH1 region sequences.

[0248] The term Fv fragment means a monovalent antigen-binding fragment of a monoclonal antibody, including all or part of the VL and VH, and absent of the CL and CH1 domains. The VL and VH include, for example, the CDRs. Single-chain antibodies (sFv or scFv) are Fv molecules in which the VL and VH regions have been connected by a flexible linker to form a single polypeptide chain, which forms an antigen-binding fragment. Single chain antibodies are discussed in detail in International Patent Application Publication No. WO 88/01649 and U.S. Pat. Nos. 4,946,778 and 5,260,203, the disclosures of which are herein incorporated by reference. The term (scFv) 2 means bivalent or bispecific sFv polypeptide chains that include oligomerization domains at their C-termini, separated from the sFv by a hinge region (Pack et al. 1992). The oligomerization domain comprises self-associating a-helices, e.g., leucine zippers, which can be further stabilized by additional disulfide bonds. (scFv) 2 fragments are also known as “miniantibodies” or “minibodies.”

[0249] A single domain antibody is an antigen-binding fragment containing only a VH or the VL domain. In some instances, two or more VH regions are covalently joined with a peptide linker to create a bivalent domain antibody. The two VH regions of a bivalent domain antibody may target the same or different antigens.

### 2. Fragment Antigen Binding Region, Fab

[0250] Fab polypeptides of the disclosure include the Fab antigen binding fragment of an antibody. Unless specifically stated otherwise, the term “Fab” relates to a polypeptide excluding the Fc portion of the antibody. The Fab may be conjugated to a polypeptide comprising other components, such as further antigen binding domains, costimulatory domains, linkers, peptide spacers, transmembrane domains, endodomains, and accessory proteins. Fab polypeptides can be generated using conventional techniques known in the art and are well-described in the literature.

### 3. Fragment Crystallizable Region, Fc

[0251] An Fc region contains two heavy chain fragments comprising the CH2 and CH3 domains of an antibody. The two heavy chain fragments are held together by two or more disulfide bonds and by hydrophobic interactions of the CH3 domains. The term “Fc polypeptide” as used herein includes native and mutein forms of polypeptides derived from the Fc region of an antibody. Truncated forms of such polypeptides containing the hinge region that promotes dimerization are included.

C. Polypeptides with antibody CDRs & Scaffolding Domains that Display the CDRs

[0252] Antigen-binding peptide scaffolds, such as complementarity-determining regions (CDRs), may be used to generate protein-binding molecules. Generally, a person skilled in the art can determine the type of protein scaffold on which to graft at least one of the CDRs. It is known that scaffolds, optimally, must meet a number of criteria such as: good phylogenetic conservation; known three-dimensional structure; small size; few or no post-transcriptional modifications; and/or be easy to produce, express, and purify. Skerra, J Mol Recognit, 13:167-87 (2000).

[0253] The protein scaffolds can be sourced from, but not limited to: fibronectin type III FN3 domain (known as “monobodies”), fibronectin type III domain 10, lipocalin, anticalin, Z-domain of protein A of Staphylococcus aureus, thioredoxin A or proteins with a repeated motif such as the “ankyrin repeat”, the “armadillo repeat”, the “leucine-rich repeat” and the “tetratricopeptide repeat”. Such proteins are described in US Patent Publication Nos. 2010/0285564, 2006/0058510, 2006/0088908, 2005/0106660, and PCT Publication No. WO2006/056464, each of which are specifically incorporated herein by reference in their entirety. Scaffolds derived from toxins from scorpions, insects, plants, mollusks, etc., and the protein inhibiters of neuronal NO synthase (PIN) may also be used.

### D. Antibody Binding

[0254] The term “selective binding agent” refers to a molecule that binds to an antigen. Non-limiting examples include antibodies, antigen-binding fragments, scFv, Fab, Fab′, F(ab′)2, single chain antibodies, peptides, peptide fragments and proteins.

[0255] The term “binding” refers to a direct association between two molecules, due to, for example, covalent, electrostatic, hydrophobic, and ionic and/or hydrogen-bond interactions, including interactions such as salt bridges and water bridges. “Immunologically reactive” means that the selective binding agent or antibody of interest will bind with antigens present in a biological sample. The term “immune complex” refers the combination formed when an antibody or selective binding agent binds to an epitope on an antigen.

### 1. Affinity/Avidity

[0256] The term “affinity” refers the strength with which an antibody or selective binding agent binds an epitope. In antibody binding reactions, this is expressed as the affinity constant (Ka or ka sometimes referred to as the association constant) for any given antibody or selective binding agent. Affinity is measured as a comparison of the binding strength of the antibody to its antigen relative to the binding strength of the antibody to an unrelated amino acid sequence. Affinity can be expressed as, for example, 20-fold greater binding ability of the antibody to its antigen then to an unrelated amino acid sequence. As used herein, the term “avidity” refers to the resistance of a complex of two or more agents to dissociation after dilution. The terms “immunoreactive” and “preferentially binds” are used interchangeably herein with respect to antibodies and/or selective binding agent.

[0257] There are several experimental methods that can be used by one skilled in the art to evaluate the binding affinity of any given antibody or selective binding agent for its antigen. This is generally done by measuring the equilibrium dissociation constant (KD or Kd), using the equation KD=koff/kon=[A][B]/[AB]. The term koff is the rate of dissociation between the antibody and antigen per unit time, and is related to the concentration of antibody and antigen present in solution in the unbound form at equilibrium. The term kon is the rate of antibody and antigen association per unit time, and is related to the concentration of the bound antigen-antibody complex at equilibrium. The units used for measuring the KD are mol/L (molarity, or M), or concentration. The Ka of an antibody is the opposite of the KD, and is determined by the equation Ka=1/KD. Examples of some experimental methods that can be used to determine the KD value are: enzyme-linked immunosorbent assays (ELISA), isothermal titration calorimetry (ITC), fluorescence anisotropy, surface plasmon resonance (SPR), and affinity capillary electrophoresis (ACE). The affinity constant (Ka) of an antibody is the opposite of the KD, and is determined by the equation Ka=1/KD.

[0258] Antibodies deemed useful may have an affinity constant (Ka) of about, at least about, or at most about 10⁶, 10⁷, 10⁸, 10⁹, or 10¹⁰ M or any range derivable therein. Similarly, antibodies may have a dissociation constant of about, at least about or at most about 10⁻⁶, 10⁻⁷, 10⁻⁸, 10⁻⁹, 10⁻¹⁰ M, or any range derivable therein. These values are reported for antibodies discussed herein and the same assay may be used to evaluate the binding properties of such antibodies. An antibody of the invention is said to “specifically bind” its target antigen when the dissociation constant (K_{D}) is ≤10⁻⁸ M. The antibody specifically binds antigen with “high affinity” when the K_{D} is ≤5×10⁻⁹ M, and with “very high affinity” when the KD is ≤5×10⁻¹⁰ M.

### 2. Epitope Specificity

[0259] The epitope of an antigen is the specific region of the antigen for which an antibody has binding affinity. In the case of protein or polypeptide antigens, the epitope is the specific residues (or specified amino acids or protein segment) that the antibody binds with high affinity. An antibody does not necessarily contact every residue within the protein. Nor does every single amino acid substitution or deletion within a protein necessarily affect binding affinity. For purposes of this specification and the accompanying claims, the terms “epitope” and “antigenic determinant” are used interchangeably to refer to the site on an antigen to which B and/or T cells respond or recognize. Polypeptide epitopes can be formed from both contiguous amino acids and noncontiguous amino acids juxtaposed by tertiary folding of a polypeptide. An epitope typically includes at least 3, and typically 5-10 amino acids in a unique spatial conformation.

[0260] Epitope specificity of an antibody can be determined in a variety of ways. One approach, for example, involves testing a collection of overlapping peptides of 15 amino acids spanning the full sequence of the protein and differing in increments of a small number of amino acids (e.g., 3 to 30 amino acids). The peptides are immobilized in separate wells of a microtiter dish. Immobilization can be accomplished, for example, by biotinylating one terminus of the peptides. This process may affect the antibody affinity for the epitope, therefore different samples of the same peptide can be biotinylated at the N and C terminus and immobilized in separate wells for the purposes of comparison. This is useful for identifying end-specific antibodies. Optionally, additional peptides can be included terminating at a particular amino acid of interest. This approach is useful for identifying end-specific antibodies to internal fragments. An antibody or antigen-binding fragment is screened for binding to each of the various peptides. The epitope is defined as a segment of amino acids that is common to all peptides to which the antibody shows high affinity binding.

### 3. Modification of Antibody Antigen-Binding Domains

[0261] It is understood that the antibodies of the present invention may be modified, such that they are substantially identical to the antibody polypeptide sequences, or fragments thereof, and still bind the epitopes of the present invention. Polypeptide sequences are “substantially identical” when optimally aligned using such programs as Clustal Omega, IGBLAST, GAP or BESTFIT using default gap weights, they share at least 80% sequence identity, at least 90% sequence identity, at least 95% sequence identity, at least 96% sequence identity, at least 97% sequence identity, at least 98% sequence identity, or at least 99% sequence identity or any range therein.

[0262] As discussed herein, minor variations in the amino acid sequences of antibodies or antigen-binding regions thereof are contemplated as being encompassed by the present invention, providing that the variations in the amino acid sequence maintain at least 75%, more preferably at least 80%, at least 90%, at least 95%, at least 96%, at least 97%, at least 98% and most preferably at least 99% sequence identity. In particular, conservative amino acid replacements are contemplated.

[0263] Conservative replacements are those that take place within a family of amino acids that are related in their side chains. Genetically encoded amino acids are generally divided into families based on the chemical nature of the side chain; e.g., acidic (aspartate, glutamate), basic (lysine, arginine, histidine), nonpolar (alanine, valine, leucine, isoleucine, proline, phenylalanine, methionine, tryptophan), and uncharged polar (glycine, asparagine, glutamine, cysteine, serine, threonine, tyrosine). For example, it is reasonable to expect that an isolated replacement of a leucine moiety with an isoleucine or valine moiety, or a similar replacement of an amino acid with a structurally related amino acid in the same family, will not have a major effect on the binding or properties of the resulting molecule, especially if the replacement does not involve an amino acid within a framework site. Whether an amino acid change results in a functional peptide can readily be determined by assaying the specific activity of the polypeptide derivative. Standard ELISA, Surface Plasmon Resonance (SPR), or other antibody binding assays can be performed by one skilled in the art to make a quantitative comparison of antigen binging affinity between the unmodified antibody and any polypeptide derivatives with conservative substitutions generated through any of several methods available to one skilled in the art.

[0264] Fragments or analogs of antibodies or immunoglobulin molecules can be readily prepared by those skilled in the art. Preferred amino- and carboxy-termini of fragments or analogs occur near boundaries of functional domains. Structural and functional domains can be identified by comparison of the nucleotide and/or amino acid sequence data to public or proprietary sequence databases. Preferably, computerized comparison methods are used to identify sequence motifs or predicted protein conformation domains that occur in other proteins of known structure and/or function. Standard methods to identify protein sequences that fold into a known three-dimensional structure are available to those skilled in the art; Dill and McCallum., Science 338:1042-1046 (2012). Several algorithms for predicting protein structures and the gene sequences that encode these have been developed, and many of these algorithms can be found at the National Center for Biotechnology Information (on the World Wide Web at ncbi.nlm.nih.gov/guide/proteins/) and at the Bioinformatics Resource Portal (on the World Wide Web at expasy.org/proteomics). Thus, the foregoing examples demonstrate that those of skill in the art can recognize sequence motifs and structural conformations that may be used to define structural and functional domains in accordance with the invention.

[0265] Framework modifications can be made to antibodies to decrease immunogenicity, for example, by “backmutating” one or more framework residues to a corresponding germline sequence.

[0266] It is also contemplated that the antigen-binding domain may be multi-specific or multivalent by multimerizing the antigen-binding domain with VH and VL region pairs that bind either the same antigen (multi-valent) or a different antigen (multi-specific).

### E. Chemical Modification of Antibodies

[0267] Also contemplated are glycosylation variants of antibodies, wherein the number and/or type of glycosylation site(s) has been altered compared to the amino acid sequences of the parent polypeptide. Glycosylation of the polypeptides can be altered, for example, by modifying one or more sites of glycosylation within the polypeptide sequence to increase the affinity of the polypeptide for antigen (U.S. Pat. Nos. 5,714,350 and 6,350,861). Antibody protein variants may comprise a greater or a lesser number of N-linked glycosylation sites than the native antibody. An N-linked glycosylation site is characterized by the sequence: Asn-X-Ser or Asn-X-Thr, wherein the amino acid residue designated as X may be any amino acid residue except proline. The substitution of amino acid residues to create this sequence provides a potential new site for the addition of an N-linked carbohydrate chain. Alternatively, substitutions that eliminate or alter this sequence will prevent addition of an N-linked carbohydrate chain present in the native polypeptide. For example, the glycosylation can be reduced by the deletion of an Asn or by substituting the Asn with a different amino acid. One or more new N-linked glycosylation sites may be created. Antibodies typically have an N-linked glycosylation site in the Fc region.

[0268] Additional antibody variants include cysteine variants, wherein one or more cysteine residues in the parent or native amino acid sequence are deleted from or substituted with another amino acid (e.g., serine). Cysteine variants are useful, inter alia, when antibodies must be refolded into a biologically active conformation. Cysteine variants may have fewer cysteine residues than the native antibody and typically have an even number to minimize interactions resulting from unpaired cysteines.

[0269] The polypeptides can be pegylated to increase biological half-life by reacting the polypeptide with polyethylene glycol (PEG) or a reactive ester or aldehyde derivative of PEG, under conditions in which one or more PEG groups become attached to the polypeptide. Polypeptide pegylation may be carried out by an acylation reaction or an alkylation reaction with a reactive PEG molecule (or an analogous reactive water-soluble polymer). Methods for pegylating proteins are known in the art and can be applied to the polypeptides of the invention to obtain PEGylated derivatives of antibodies. See, e.g., EP 0 154 316 and EP 0 401 384. The antibody can be conjugated or otherwise linked to transthyretin (TTR) or a TTR variant. The TTR or TTR variant can be chemically modified with, for example, a chemical selected from the group consisting of dextran, poly(n-vinyl pyrrolidone), polyethylene glycols, propropylene glycol homopolymers, polypropylene oxide/ethylene oxide co-polymers, polyoxyethylated polyols, and polyvinyl alcohols. As used herein, the term “polyethylene glycol” is intended to encompass any of the forms of PEG that have been used to derivatize other proteins.

### 1. Conjugation

[0270] Derivatives of the antibodies and antigen binding fragments that are described herein are also provided. The derivatized antibody or fragment thereof may comprise any molecule or substance that imparts a desired property to the antibody or fragment. The derivatized antibody can comprise, for example, a detectable (or labeling) moiety (e.g., a radioactive, colorimetric, antigenic, or enzymatic molecule, or a detectable bead), a molecule that binds to another molecule (e.g., biotin or streptavidin), a therapeutic or diagnostic moiety (e.g., a radioactive, cytotoxic, or pharmaceutically active moiety), or a molecule that increases the suitability of the antibody for a particular use (e.g., administration to a subject, such as a human subject, or other in vivo or in vitro uses).

[0271] Optionally, an antibody or an immunological portion of an antibody can be chemically conjugated to, or expressed as, a fusion protein with other proteins. Polypeptides may be chemically modified by conjugating or fusing the polypeptide to serum protein, such as human serum albumin, to increase half-life of the resulting molecule. See, e.g., EP 0322094 and EP 0 486 525. The polypeptides may be conjugated to a diagnostic agent and used diagnostically, for example, to monitor the development or progression of a disease and determine the efficacy of a given treatment regimen. The polypeptides may also be conjugated to a therapeutic agent to provide a therapy in combination with the therapeutic effect of the polypeptide. Additional suitable conjugated molecules include ribonuclease (RNase), DNase I, an antisense nucleic acid, an inhibitory RNA molecule such as a siRNA molecule, an immunostimulatory nucleic acid, aptamers, ribozymes, triplex forming molecules, and external guide sequences. The functional nucleic acid molecules may act as effectors, inhibitors, modulators, and stimulators of a specific activity possessed by a target molecule, or the functional nucleic acid molecules may possess a de novo activity independent of any other molecules.

[0272] Disclosed are antibodies and antibody-like molecules that are linked to at least one agent to form an antibody conjugate or payload. In order to increase the efficacy of antibody molecules as diagnostic or therapeutic agents, it is conventional to link or covalently bind or complex at least one desired molecule or moiety. Such a molecule or moiety may be, but is not limited to, at least one effector or reporter molecule. Effector molecules comprise molecules having a desired activity, e.g., cytotoxic activity. Non-limiting examples of effector molecules include toxins, therapeutic enzymes, antibiotics, radiolabeled nucleotides and the like. By contrast, a reporter molecule is defined as any moiety that may be detected using an assay. Non-limiting examples of reporter molecules that have been conjugated to antibodies include enzymes, radiolabels, haptens, fluorescent labels, phosphorescent molecules, chemiluminescent molecules, chromophores, luminescent molecules, photoaffinity molecules, colored particles, or ligands.

a. Conjugate Types

[0273] Certain examples of antibody conjugates are those conjugates in which the antibody is linked to a detectable label. “Detectable labels” are compounds and/or elements that can be detected due to their specific functional properties, and/or chemical characteristics, the use of which allows the antibody to be detected, and/or further quantified if desired. Examples of detectable labels include, but not limited to, radioactive isotopes, fluorescers, semiconductor nanocrystals, chemiluminescers, chromophores, enzymes, enzyme substrates, enzyme cofactors, enzyme inhibitors, dyes, metal ions, metal sols, ligands (e.g., biotin, streptavidin or haptens) and the like. Particular examples of labels are, but not limited to, horseradish peroxidase (HRP), fluorescein, FITC, rhodamine, dansyl, umbelliferone, dimethyl acridinium ester (DMAE), Texas red, luminol, NADPH and α- or β-galactosidase. Antibody conjugates include those intended primarily for use in vitro, where the antibody is linked to a secondary binding ligand and/or to an enzyme to generate a colored product upon contact with a chromogenic substrate. Examples of suitable enzymes include, but are not limited to, urease, alkaline phosphatase, (horseradish) hydrogen peroxidase, or glucose oxidase. Preferred secondary binding ligands are biotin and/or avidin and streptavidin compounds. The uses of such labels is well known to those of skill in the art and are described, for example, in U.S. Pat. Nos. 3,817,837; 3,850,752; 3,939,350; 3,996,345; 4,277,437; 4,275,149 and 4,366,241; each incorporated herein by reference. Molecules containing azido groups may also be used to form covalent bonds to proteins through reactive nitrene intermediates that are generated by low intensity ultraviolet light (Potter & Haley, 1983).

[0274] Also contemplated are immunoconjugates comprising an antibody or antigen-binding fragment thereof conjugated to a cytotoxic agent such as a chemotherapeutic agent, a drug, a growth inhibitory agent, a toxin (e.g., an enzymatically active toxin of bacterial, fungal, plant, or animal origin, or fragments thereof), or a radioactive isotope (i.e., a radioconjugate). In this way, the agent of interest can be targeted directly to cells bearing cell surface antigen. The antibody and agent may be associated through non-covalent interactions such as through electrostatic forces, or by covalent bonds. Various linkers, known in the art, can be employed in order to form the immunoconjugate. Additionally, the immunoconjugate can be provided in the form of a fusion protein. An antibody may be conjugated to various therapeutic substances in order to target the cell surface antigen. Examples of conjugated agents include, but are not limited to, metal chelate complexes, drugs, toxins and other effector molecules, such as cytokines, lymphokines, chemokines, immunomodulators, radiosensitizers, asparaginase, carboranes, and radioactive halogens.

[0275] In antibody drug conjugates (ADC), an antibody (Ab) is conjugated to one or more drug moieties (D) through a linker (L). The ADC may be prepared by several routes, employing organic chemistry reactions, conditions, and reagents known to those skilled in the art, including: (1) reaction of a nucleophilic group of an antibody with a bivalent linker reagent, to form Ab-L, via a covalent bond, followed by reaction with a drug moiety D; and (2) reaction of a nucleophilic group of a drug moiety with a bivalent linker reagent, to form D-L, via a covalent bond, followed by reaction with the nucleophilic group of an antibody. Antibody drug conjugates may also be produced by modification of the antibody to introduce electrophilic moieties, which can react with nucleophilic substituents on the linker reagent or drug. Alternatively, a fusion protein comprising the antibody and cytotoxic agent may be made, e.g., by recombinant techniques or peptide synthesis. The length of DNA may comprise respective regions encoding the two portions of the conjugate either adjacent one another or separated by a region encoding a linker peptide which does not destroy the desired properties of the conjugate.

[0276] ADC can include covalent or aggregative conjugates of antibodies, or antigen-binding fragments thereof, with other proteins or polypeptides, such as by expression of recombinant fusion proteins comprising heterologous polypeptides fused to the N-terminus or C-terminus of an antibody polypeptide. For example, the conjugated peptide may be a heterologous signal (or leader) polypeptide, e.g., the yeast alpha-factor leader, or a peptide such as an epitope tag (e.g., V5-His). Antibody-containing fusion proteins may comprise peptides added to facilitate purification or identification of the antibody (e.g., poly-His). An antibody polypeptide also can be linked to the FLAG® (Sigma-Aldrich, St. Louis, Mo.) peptide as described in Hopp et al., Bio/Technology 6:1204 (1988), and U.S. Pat. No. 5,011,912. Oligomers that contain one or more antibody polypeptides may be employed as antagonists. Oligomers may be in the form of covalently linked or non-covalently linked dimers, trimers, or higher oligomers. Oligomers comprising two or more antibody polypeptides are contemplated for use. Other oligomers include heterodimers, homotrimers, heterotrimers, homotetramers, heterotetramers, etc. Oligomers may comprise multiple antibody polypeptides joined via covalent or non-covalent interactions between peptide moieties fused to the antibody polypeptides. Such peptides may be peptide linkers (spacers), or peptides that have the property of promoting oligomerization. Leucine zippers and certain polypeptides derived from antibodies are among the peptides that can promote oligomerization of antibody polypeptides attached thereto, as described in more detail below.

b. Conjugation Methodology

[0277] Several methods are known in the art for the attachment or conjugation of an antibody to its conjugate moiety. Some attachment methods involve the use of a metal chelate complex employing, for example, an organic chelating agent such a diethylenetriaminepentaacetic acid anhydride (DTPA); ethylenetriaminetetraacetic acid; N-chloro-p-toluenesulfonamide; and/or tetrachloro-3-6-diphenylglycouril-3 attached to the antibody (U.S. Pat. Nos. 4,472,509 and 4,938,948, each incorporated herein by reference). Monoclonal antibodies may also be reacted with an enzyme in the presence of a coupling agent such as glutaraldehyde or periodate. Conjugates may also be made using a variety of bifunctional protein-coupling agents such as N-succinimidyl-3-(2-pyridyldithiol) propionate (SPDP), iminothiolane (IT), bifunctional derivatives of imidoesters (such as dimethyl adipimidate HCl), active esters (such as disuccinimidyl suberate), aldehydes (such as glutaraldehyde), bis-azido compounds (such as bis (p-azidobenzoyl) hexanediamine), bis-diazonium derivatives (such as bos(p-diazoniumbenzoyl)-ethylenediamine), diisocyanates (such as toluene 2,6-diisocyanate), and bis-active fluorine compounds (such as 1,5-difluoro-2,4-dinitrobenzene). Also contemplated are derivatization of immunoglobulins by selectively introducing sulfhydryl groups in the Fc region of an immunoglobulin, using reaction conditions that do not alter the antibody combining site. Antibody conjugates produced according to this methodology are disclosed to exhibit improved longevity, specificity, and sensitivity (U.S. Pat. No. 5,196,066, incorporated herein by reference). Site-specific attachment of effector or reporter molecules, wherein the reporter or effector molecule is conjugated to a carbohydrate residue in the Fc region has also been disclosed in the literature (O'Shannessy et al., 1987).

### II. Antibody Production

### A. Antibody Production

[0278] Methods for preparing and characterizing antibodies for use in diagnostic and detection assays, for purification, and for use as therapeutics are well known in the art as disclosed in, for example, U.S. Pat. Nos. 4,011,308; 4,722,890; 4,016,043; 3,876,504; 3,770,380; and 4,372,745 (see, e.g., Antibodies: A Laboratory Manual, Cold Spring Harbor Laboratory, 1988; incorporated herein by reference). These antibodies may be polyclonal or monoclonal antibody preparations, monospecific antisera, human antibodies, hybrid or chimeric antibodies, such as humanized antibodies, altered antibodies, F(ab′)2 fragments, Fab fragments, Fv fragments, single-domain antibodies, dimeric or trimeric antibody fragment constructs, minibodies, or functional fragments thereof which bind to the antigen in question. Polypeptides, peptides, and proteins and immunogenic fragments thereof for use in methods and compositions of the disclosure can also be synthesized in solution or on a solid support in accordance with conventional techniques. See, for example, Stewart and Young, (1984); Tarn et al, (1983); Merrifield, (1986); and Barany and Merrifield (1979), each incorporated herein by reference.

[0279] Briefly, a polyclonal antibody is prepared by immunizing an animal with an antigen or a portion thereof and collecting antisera from that immunized animal. The antigen may be altered compared to an antigen sequence found in nature. A variant or altered antigenic peptide or polypeptide may be employed to generate antibodies. Inocula are typically prepared by dispersing the antigenic composition in a physiologically tolerable diluent to form an aqueous composition. Antisera is subsequently collected by methods known in the arts, and the serum may be used as-is for various applications or else the desired antibody fraction may be purified by well-known methods, such as affinity chromatography (Harlow and Lane, Antibodies: A Laboratory Manual 1988).

[0280] Methods of making monoclonal antibodies are also well known in the art (Kohler and Milstein, 1975; Harlow and Lane, 1988, U.S. Pat. No. 4,196,265, herein incorporated by reference in its entirety for all purposes). Typically, this technique involves immunizing a suitable animal with a selected immunogenic composition, e.g., a purified or partially purified protein, polypeptide, peptide or domain. Resulting antibody-producing B-cells from the immunized animal, or all dissociated splenocytes, are then induced to fuse with cells from an immortalized cell line to form hybridomas. Myeloma cell lines suited for use in hybridoma-producing fusion procedures preferably are non-antibody-producing and have high fusion efficiency and enzyme deficiencies that render then incapable of growing in certain selective media that support the growth of only the desired fused cells (hybridomas). Typically, the fusion partner includes a property that allows selection of the resulting hybridomas using specific media. For example, fusion partners can be hypoxanthine/aminopterin/thymidine (HAT)-sensitive. Methods for generating hybrids of antibody-producing spleen or lymph node cells and myeloma cells usually comprise mixing somatic cells with myeloma cells in the presence of an agent or agents (chemical or electrical) that promote the fusion of cell membranes. Next, selection of hybridomas can be performed by culturing the cells by single-clone dilution in microtiter plates, followed by testing the individual clonal supernatants (after two to three weeks) for the desired reactivity. Fusion procedures for making hybridomas, immunization protocols, and techniques for isolation of immunized splenocytes for fusion are known in the art.

[0281] Other techniques for producing monoclonal antibodies include the viral or oncogenic transformation of B-lymphocytes, a molecular cloning approach may be used to generate a nucleic acid or polypeptide, the selected lymphocyte antibody method (SLAM) (see, e.g., Babcook et al., Proc. Natl. Acad. Sci. USA 93:7843-7848 (1996), the preparation of combinatorial immunoglobulin phagemid libraries from RNA isolated from the spleen of the immunized animal and selection of phagemids expressing appropriate antibodies, or producing a cell expressing an antibody from a genomic sequence of the cell comprising a modified immunoglobulin locus using Cre-mediated site-specific recombination (see, e.g., U.S. Pat. No. 6,091,001).

[0282] Monoclonal antibodies may be further purified using filtration, centrifugation, and various chromatographic methods such as HPLC or affinity chromatography. Monoclonal antibodies may be further screened or optimized for properties relating to specificity, avidity, half-life, immunogenicity, binding association, binding disassociation, or overall functional properties relative to being a treatment for infection. Thus, monoclonal antibodies may have alterations in the amino acid sequence of CDRs, including insertions, deletions, or substitutions with a conserved or non-conserved amino acid.

[0283] The immunogenicity of a particular immunogen composition can be enhanced by the use of non-specific stimulators of the immune response, known as adjuvants. Adjuvants that may be used include, but are not limited to, IL-1, IL-2, IL-4, IL-7, IL-12, -interferon, GMCSP, BCG, aluminum hydroxide, MDP compounds, such as thur-MDP and nor-MDP, CGP (MTP-PE), lipid A, and monophosphoryl lipid A (MPL). Exemplary adjuvants may include complete Freund's adjuvant (a non-specific stimulator of the immune response containing killed Mycobacterium tuberculosis), incomplete Freund's adjuvants, and/or aluminum hydroxide adjuvant. In addition to adjuvants, it may be desirable to co-administer biologic response modifiers (BRM), such as but not limited to, Cimetidine (CIM; 1200 mg/d) (Smith/Kline, PA); low-dose Cyclophosphamide (CYP; 300 mg/m2) (Johnson/Mead, NJ), cytokines such as B-interferon, IL-2, or IL-12, or genes encoding proteins involved in immune helper functions, such as B-7.A phage-display system can be used to expand antibody molecule populations in vitro. Saiki, et al., Nature 324:163 (1986); Scharf et al., Science 233:1076 (1986); U.S. Pat. Nos. 4,683,195 and 4,683,202; Yang et al., J Mol Biol. 254:392 (1995); Barbas, III et al., Methods: Comp. Meth Enzymol. (1995) 8:94; Barbas, III et al., Proc Natl Acad Sci USA 88:7978 (1991).

### B. Fully Human Antibody Production

[0284] Methods are available for making fully human antibodies. Using fully human antibodies can minimize the immunogenic and allergic responses that may be caused by administering non-human monoclonal antibodies to humans as therapeutic agents. Human antibodies may be produced in a non-human transgenic animal, e.g., a transgenic mouse capable of producing multiple isotypes of human antibodies to protein (e.g., IgG, IgA, and/or IgE) by undergoing V-D-J recombination and isotype switching. This may apply to antibodies, antibody fragments, and pharmaceutical compositions thereof, but also non-human transgenic animals, B-cells, host cells, and hybridomas that produce monoclonal antibodies. Applications of human antibodies include, but are not limited to, detect a cell expressing an anticipated protein, either in vivo or in vitro, pharmaceutical preparations containing the antibodies of the present invention, and methods of treating disorders by administering the antibodies.

[0285] Fully human antibodies can be produced by immunizing transgenic animals (usually mice) that are capable of producing a repertoire of human antibodies in the absence of endogenous immunoglobulin production. Antigens for this purpose typically have six or more contiguous amino acids, and optionally are conjugated to a carrier, such as a hapten. See, for example, Jakobovits et al., Proc. Natl. Acad. Sci. USA 90:2551-2555 (1993); Jakobovits et al., Nature 362:255-258 (1993); Bruggermann et al., Year in Immunol. 7:33 (1993). In one example, transgenic animals are produced by incapacitating the endogenous mouse immunoglobulin loci encoding the mouse heavy and light immunoglobulin chains therein, and inserting into the mouse genome large fragments of human genome DNA containing loci that encode human heavy and light chain proteins. Partially modified animals, which have less than the full complement of human immunoglobulin loci, are then crossbred to obtain an animal having all of the desired immune system modifications. When administered an immunogen, these transgenic animals produce antibodies that are immunospecific for the immunogen but have human rather than murine amino acid sequences, including the variable regions. For further details of such methods, see, for example, International Patent Application Publication Nos. WO 96/33735 and WO 94/02602, which are hereby incorporated by reference in their entirety. Additional methods relating to transgenic mice for making human antibodies are described in U.S. Pat. Nos. 5,545,807; 6,713,610; 6,673,986; 6,162,963; 6,300,129; 6,255,458; 5,877,397; 5,874,299 and 5,545,806; in International Patent Application Publication Nos. WO 91/10741 and WO 90/04036; and in European Patent Nos. EP 546073B1 and EP 546073A1, all of which are hereby incorporated by reference in their entirety for all purposes.

[0286] The transgenic mice described above, referred to herein as “HuMAb” mice, contain a human immunoglobulin gene minilocus that encodes unrearranged human heavy (μ and γ) and κ light chain immunoglobulin sequences, together with targeted mutations that inactivate the endogenous μ and κ chain loci (Lonberg et al., Nature 368:856-859 (1994)). Accordingly, the mice exhibit reduced expression of mouse IgM or κ chains and in response to immunization, the introduced human heavy and light chain transgenes undergo class switching and somatic mutation to generate high affinity human IgG K monoclonal antibodies (Lonberg et al., supra; Lonberg and Huszar, Intern. Ref. Immunol. 13:65-93 (1995); Harding and Lonberg, Ann. N.Y. Acad. Sci. 764:536-546 (1995)). The preparation of HuMAb mice is described in detail in Taylor et al., Nucl. Acids Res. 20:6287-6295 (1992); Chen et al., Int. Immunol. 5:647-656 (1993); Tuaillon et al., J. Immunol. 152:2912-2920 (1994); Lonberg et al., supra; Lonberg, Handbook of Exp. Pharmacol. 113:49-101 (1994); Taylor et al., Int. Immunol. 6:579-591 (1994); Lonberg and Huszar, Intern. Ref. Immunol. 13:65-93 (1995); Harding and Lonberg, Ann. N. Y. Acad. Sci. 764:536-546 (1995); Fishwild et al., Nat. Biotechnol. 14:845-851 (1996); the foregoing references are herein incorporated by reference in their entirety for all purposes. See further, U.S. Pat. Nos. 5,545,806; 5,569,825; 5,625,126; 5,633,425; 5,789,650; 5,877,397; 5,661,016; 5,814,318; 5,874,299; 5,770,429; and 5,545,807; as well as International Patent Application Publication Nos. WO 93/1227; WO 92/22646; and WO 92/03918, the disclosures of all of which are hereby incorporated by reference in their entirety for all purposes. Technologies utilized for producing human antibodies in these transgenic mice are disclosed also in WO 98/24893, and Mendez et al., Nat. Genetics 15:146-156 (1997), which are herein incorporated by reference. For example, the HCo7 and HCo12 transgenic mice strains can be used to generate human antibodies.

[0287] Using hybridoma technology, antigen-specific humanized monoclonal antibodies with the desired specificity can be produced and selected from the transgenic mice such as those described above. Such antibodies may be cloned and expressed using a suitable vector and host cell, or the antibodies can be harvested from cultured hybridoma cells. Fully human antibodies can also be derived from phage-display libraries (as disclosed in Hoogenboom et al., J. Mol. Biol. 227:381 (1991); and Marks et al., J. Mol. Biol. 222:581 (1991)). One such technique is described in International Patent Application Publication No. WO 99/10494 (herein incorporated by reference), which describes the isolation of high affinity and functional agonistic antibodies for MPL- and msk-receptors using such an approach.

### C. Antibody Fragments Production

[0288] Antibody fragments that retain the ability to recognize the antigen of interest will also find use herein. A number of antibody fragments are known in the art that comprise antigen-binding sites capable of exhibiting immunological binding properties of an intact antibody molecule and can be subsequently modified by methods known in the arts. Functional fragments, including only the variable regions of the heavy and light chains, can also be produced using standard techniques such as recombinant production or preferential proteolytic cleavage of immunoglobulin molecules. These fragments are known as Fv. See, e.g., Inbar et al., Proc. Nat. Acad. Sci. USA 69:2659-2662 (1972); Hochman et al., Biochem. 15:2706-2710 (1976); and Ehrlich et al., Biochem. 19:4091-4096 (1980).

[0289] Single-chain variable fragments (scFvs) may be prepared by fusing DNA encoding a peptide linker between DNAs encoding the two variable domain polypeptides (VL and VH). scFvs can form antigen-binding monomers, or they can form multimers (e.g., dimers, trimers, or tetramers), depending on the length of a flexible linker between the two variable domains (Kortt et al., Prot. Eng. 10:423 (1997); Kort et al., Biomol. Eng. 18:95-108 (2001)). By combining different VL- and VH-comprising polypeptides, one can form multimeric scFvs that bind to different epitopes (Kriangkum et al., Biomol. Eng. 18:31-40 (2001)). Antigen-binding fragments are typically produced by recombinant DNA methods known to those skilled in the art. Although the two domains of the Fv fragment, VL and VH, are coded for by separate genes, they can be joined using recombinant methods by a synthetic linker that enables them to be made as a single chain polypeptide (known as single chain Fv (sFv or scFv); see e.g., Bird et al., Science 242:423-426 (1988); and Huston et al., Proc. Natl. Acad. Sci. USA 85:5879-5883 (1988). Design criteria include determining the appropriate length to span the distance between the C-terminus of one chain and the N-terminus of the other, wherein the linker is generally formed from small hydrophilic amino acid residues that do not tend to coil or form secondary structures. Suitable linkers generally comprise polypeptide chains of alternating sets of glycine and serine residues, and may include glutamic acid and lysine residues inserted to enhance solubility. Antigen-binding fragments are screened for utility in the same manner as intact antibodies. Such fragments include those obtained by amino-terminal and/or carboxy-terminal deletions, where the remaining amino acid sequence is substantially identical to the corresponding positions in the naturally occurring sequence deduced, for example, from a full-length cDNA sequence.

[0290] Antibodies may also be generated using peptide analogs of the epitopic determinants disclosed herein, which may consist of non-peptide compounds having properties analogous to those of the template peptide. These types of non-peptide compound are termed “peptide mimetics” or “peptidomimetics”. Fauchere, J. Adv. Drug Res. 15:29 (1986); Veber and Freidinger TINS p. 392 (1985); and Evans et al., J. Med. Chem. 30:1229 (1987). Liu et al. (2003) also describe “antibody like binding peptidomimetics” (ABiPs), which are peptides that act as pared-down antibodies and have certain advantages of longer serum half-life as well as less cumbersome synthesis methods. These analogs can be peptides, non-peptides or combinations of peptide and non-peptide regions. Fauchere, Adv. Drug Res. 15:29 (1986); Veber and Freidiner, TINS p. 392 (1985); and Evans et al., J. Med. Chem. 30:1229 (1987), which are incorporated herein by reference in their entirety for any purpose. Peptide mimetics that are structurally similar to therapeutically useful peptides may be used to produce a similar therapeutic or prophylactic effect. Such compounds are often developed with the aid of computerized molecular modeling. Generally, peptidomimetics of the invention are proteins that are structurally similar to an antibody displaying a desired biological activity, such as the ability to bind a protein, but have one or more peptide linkages optionally replaced by a linkage selected from: —CH2NH—, —CH2S—, —CH2-CH2-, —CH═CH-(cis and trans), —COCH2-, —CH(OH)CH2-, and —CH2SO— by methods well known in the art. Systematic substitution of one or more amino acids of a consensus sequence with a D-amino acid of the same type (e.g., D-lysine in place of L-lysine) may be used to generate more stable proteins. In addition, constrained peptides comprising a consensus sequence or a substantially identical consensus sequence variation may be generated by methods known in the art (Rizo and Gierasch, Ann. Rev. Biochem. 61:387 (1992), incorporated herein by reference), for example, by adding internal cysteine residues capable of forming intramolecular disulfide bridges which cyclize the peptide.

[0291] Once generated, a phage display library can be used to improve the immunological binding affinity of the Fab molecules using known techniques. See, e.g., Figini et al., J. Mol. Biol. 239:68 (1994). The coding sequences for the heavy and light chain portions of the Fab molecules selected from the phage display library can be isolated or synthesized and cloned into any suitable vector or replicon for expression. Any suitable expression system can be used.

### III. Obtaining Encoded Antibodies

[0292] Also provided are nucleic acid molecule encoding antibody polypeptides (e.g., heavy or light chain, variable domain only, or full-length). These may be generated by methods known in the art, e.g., isolated from B cells of mice that have been immunized and isolated, phage display, expressed in any suitable recombinant expression system and allowed to assemble to form antibody molecules.

### A. Expression

[0293] The nucleic acid molecules may be used to express large quantities of recombinant antibodies or to produce chimeric antibodies, single chain antibodies, immunoadhesins, diabodies, mutated antibodies, and other antibody derivatives. If the nucleic acid molecules are derived from a non-human, non-transgenic animal, the nucleic acid molecules may be used for antibody humanization.

### 1. Vectors

[0294] Also contemplated are expression vectors comprising a nucleic acid molecule encoding a polypeptide of the desired sequence or a portion thereof (e.g., a fragment containing one or more CDRs or one or more variable region domains). Expression vectors comprising the nucleic acid molecules may encode the heavy chain, light chain, or the antigen-binding portion thereof. Expression vectors comprising nucleic acid molecules may encode fusion proteins, modified antibodies, antibody fragments, and probes thereof. In addition to control sequences that govern transcription and translation, vectors and expression vectors may contain nucleic acid sequences that serve other functions as well.

[0295] To express the antibodies, or antigen-binding fragments thereof, DNAs encoding partial or full-length light and heavy chains are inserted into expression vectors such that the gene area is operatively linked to transcriptional and translational control sequences. A vector that encodes a functionally complete human CH or CL immunoglobulin sequence with appropriate restriction sites engineered so that any VH or VL sequence can be easily inserted and expressed. Typically, expression vectors used in any of the host cells contain sequences for plasmid or virus maintenance and for cloning and expression of exogenous nucleotide sequences. Such sequences, collectively referred to as “flanking sequences” typically include one or more of the following operatively linked nucleotide sequences: a promoter, one or more enhancer sequences, an origin of replication, a transcriptional termination sequence, a complete intron sequence containing a donor and acceptor splice site, a sequence encoding a leader sequence for polypeptide secretion, a ribosome binding site, a polyadenylation sequence, a polylinker region for inserting the nucleic acid encoding the polypeptide to be expressed, and a selectable marker element. Such sequences and methods of using the same are well known in the art.

### 2. Expression Systems

[0296] Numerous expression systems exist that comprise at least a part or all of the expression vectors discussed above. Prokaryote- and/or eukaryote-based systems can be employed for use to produce nucleic acid sequences, or their cognate polypeptides, proteins and peptides. Commercially and widely available systems include in but are not limited to bacterial, mammalian, yeast, and insect cell systems. Different host cells have characteristic and specific mechanisms for the post-translational processing and modification of proteins. Appropriate cell lines or host systems can be chosen to ensure the correct modification and processing of the foreign protein expressed. Those skilled in the art are able to express a vector to produce a nucleic acid sequence or its cognate polypeptide, protein, or peptide using an appropriate expression system.

### 3. Methods of Gene Transfer

[0297] Suitable methods for nucleic acid delivery to effect expression of compositions are anticipated to include virtually any method by which a nucleic acid (e.g., DNA, including viral and nonviral vectors) can be introduced into a cell, a tissue or an organism, as described herein or as would be known to one of ordinary skill in the art. Such methods include, but are not limited to, direct delivery of DNA such as by injection (U.S. Pat. No. 5,994,624, 5,981,274, 5,945,100, 5,780,448, 5,736,524, 5,702,932, 5,656,610, 5,589,466 and 5,580,859, each incorporated herein by reference), including microinjection (Harland and Weintraub, 1985; U.S. Pat. No. 5,789,215, incorporated herein by reference); by electroporation (U.S. Pat. No. 5,384,253, incorporated herein by reference); by calcium phosphate precipitation (Graham and Van Der Eb, 1973; Chen and Okayama, 1987; Rippe et al., 1990); by using DEAE dextran followed by polyethylene glycol (Gopal, 1985); by direct sonic loading (Fechheimer et al., 1987); by liposome mediated transfection (Nicolau and Sene, 1982; Fraley et al., 1979; Nicolau et al., 1987; Wong et al., 1980; Kaneda et al., 1989; Kato et al., 1991); by microprojectile bombardment (PCT Application Nos. WO 94/09699 and 95/06128; U.S. Pat. Nos. 5,610,042; 5,322,783, 5,563,055, 5,550,318, 5,538,877 and 5,538,880, and each incorporated herein by reference); by agitation with silicon carbide fibers (Kaeppler et al., 1990; U.S. Pat. Nos. 5,302,523 and 5,464,765, each incorporated herein by reference); by Agrobacterium mediated transformation (U.S. Pat. Nos. 5,591,616 and 5,563,055, each incorporated herein by reference); or by PEG mediated transformation of protoplasts (Omirulleh et al., 1993; U.S. Pat. Nos. 4,684,611 and 4,952,500, each incorporated herein by reference); by desiccation/inhibition mediated DNA uptake (Potrykus et al., 1985). Other methods include viral transduction, such as gene transfer by lentiviral or retroviral transduction.

### 4. Host Cells

[0298] Also contemplated are the use of host cells into which a recombinant expression vector has been introduced. Antibodies can be expressed in a variety of cell types. An expression construct encoding an antibody can be transfected into cells according to a variety of methods known in the art. Vector DNA can be introduced into prokaryotic or eukaryotic cells via conventional transformation or transfection techniques. Some vectors may employ control sequences that allow it to be replicated and/or expressed in both prokaryotic and eukaryotic cells. The antibody expression construct can be placed under control of a promoter that is linked to T-cell activation, such as one that is controlled by NFAT-1 or NF-κB, both of which are transcription factors that can be activated upon T-cell activation. One of skill in the art would understand the conditions under which to incubate host cells to maintain them and to permit replication of a vector. Also understood and known are techniques and conditions that would allow large-scale production of vectors, as well as production of the nucleic acids encoded by vectors and their cognate polypeptides, proteins, or peptides.

[0299] For stable transfection of mammalian cells, it is known, depending upon the expression vector and transfection technique used, only a small fraction of cells may integrate the foreign DNA into their genome. In order to identify and select these integrants, a selectable marker (e.g., for resistance to antibiotics) is generally introduced into the host cells along with the gene of interest. Cells stably transfected with the introduced nucleic acid can be identified by drug selection (e.g., cells that have incorporated the selectable marker gene will survive, while the other cells die), among other methods known in the arts.

### B. Isolation

[0300] The nucleic acid molecule encoding either or both of the entire heavy and light chains of an antibody or the variable regions thereof may be obtained from any source that produces antibodies. Methods of isolating mRNA encoding an antibody are well known in the art. See e.g., Sambrook et al., supra. The sequences of human heavy and light chain constant region genes are also known in the art. See, e.g., Kabat et al., 1991, supra. Nucleic acid molecules encoding the full-length heavy and/or light chains may then be expressed in a cell into which they have been introduced and the antibody isolated.

### IV. Viruses

[0301] The disclosure relates to treatment, analysis, or use of a virus. Disclosed are methods for treatment or prevention of a viral infection. Also disclosed are compositions comprising one or more anti-viral agents. Also disclosed are methods for diagnosis of a viral infection. Also disclosed are methods for detection of a virus in a sample.

### A. Coronaviruses

[0302] The virus may be from the family Coronaviridae. Coronaviridae is a family of enveloped, positive-sense, single-stranded RNA viruses. Coronavirus is the common name for Coronaviridae and Orthocoronavirinae (also referred to as Coronavirinae). The family Coronaviridae is organized in 2 sub-families, 5 genera, 23 sub-genera and approximately 40 species. They are enveloped viruses having a positive-sense single-stranded RNA genome and a nucleocapsid having helical symmetry. The genome size of coronaviruses ranges from approximately 26-32 kilobases.

[0303] The present disclosure encompasses treatment or prevention of infection of any virus in the Coronaviridae family. The disclosure may encompass treatment or prevention of infection of any virus in the subfamily Coronavirinae and including the four genera, Alpha-, Beta-, Gamma-, and Deltacoronavirus. The disclosure may include treatment or prevention of infection of any virus in the genus of Betacoronavirus, including the subgenus Sarbecovirus and including the species of severe acute respiratory syndrome-related coronavirus. The disclosure may encompass treatment or prevention of infection of any virus in the species of severe acute respiratory syndrome-related coronavirus, including the strains severe acute respiratory syndrome coronavirus (SARS-CoV) and severe acute respiratory syndrome coronavirus 2 (SARS-CoV-2, the virus that causes COVID-19). The disclosure encompasses treatment or prevention of infection any isolate, strain, type (including Type A, Type B and Type C; Forster et al., 2020, PNAS, available on the World Wide Web at doi.org/10.1073/pnas.2004999117), cluster, or sub-cluster of the species of severe acute respiratory syndrome-related coronavirus, including at least SARS-CoV-2. The virus may have a genome length between 29000 to 30000, between 29100 and 29900, between 29200 and 29900, between 29300 and 29900, between 29400 and 29900, between 29500 and 29900, between 29600 and 29900, between 29700 and 29900, between 29800 and 29900, or between 29780 and 29900 base pairs in length.

[0304] Examples of specific SARS-CoV-2 viruses include the following listed in the NCBI GenBank® Database, and these GenBank® Accession sequences are incorporated by reference herein in their entirety: (a) LC534419 and LC534418 and LC528233 and LC529905 (examples of different strains from Japan); (b) MT281577 and MT226610 and NC_045512 and MN996531 and MN908947 (examples of different strains from China); (c) MT281530 (Iran); (d) MT126808 (Brazil); (e) MT020781 (Finland); (f) MT093571 (Sweden); (g) MT263074 (Peru); (h) MT292582 and MT292581 and MT292580 and MT292579 (examples of different strains from Spain); (i) examples from the United States, such as MT276331 (TX); MT276330 (FL); MT276328 (OR) MT276327 (GA); MT276325 (WA); MT276324 (CA); MT276323 (RI); MT188341 (MN); and (j) MT276598 (Israel). The disclosure may include treatment or prevention of infection of any of these or similar viruses, including viruses whose genome has at least 80, 81, 82, 83, 84, 85, 86, 87, 88, 89, 90, 91, 92, 93, 94, 95, 96, 97, 98, 99, 99.1, 99.2, 99.3, 99.4, 99.5, 99.6, 99.7, 99.8, or 99.9% identity to any of these viruses. The disclosure includes treatment or prevention of infection of any of these or similar viruses, including viruses whose genome has its entire sequence that is greater than 80, 81, 82, 83, 84, 85, 86, 87, 88, 89, 90, 91, 92, 93, 94, 95, 96, 97, 98, 99, 99.1, 99.2, 99.3, 99.4, 99.5, 99.6, 99.7, 99.8, or 99.9% identity to any of these viruses. As one specific example, the present disclosure includes methods of treatment or prevention of infection of a virus having a genome sequence of SEQ ID NO:110 (represented by GenBank® Accession No. NC_045512; origin Wuhan, China) and any virus having a genome sequence with at least 80, 81, 82, 83, 84, 85, 86, 87, 88, 89, 90, 91, 92, 93, 94, 95, 96, 97, 98, 99, 99.1, 99.2, 99.3, 99.4, 99.5, 99.6, 99.7, 99.8, or 99.9% identity to SEQ ID NO: 110.

[0305] SARS-CoV-2 proteins are described in detail in, for example, Yoshimoto F. K. (2020). The protein journal, 39 (3), 198-216, incorporated herein by reference in its entirety.

### V. Antibodies, Antigen Binding Fragments, and Polypeptides

[0306] As used herein, a “protein” or “polypeptide” refers to a molecule comprising at least five amino acid residues. As used herein, the term “wild-type” refers to the endogenous version of a molecule that occurs naturally in an organism. Wild-type versions of a protein or polypeptide are employed, however, a modified protein or polypeptide may be employed to generate an immune response. The terms described above may be used interchangeably. A “modified protein” or “modified polypeptide” or a “variant” refers to a protein or polypeptide whose chemical structure, particularly its amino acid sequence, is altered with respect to the wild-type protein or polypeptide. A modified/variant protein or polypeptide may have at least one modified activity or function (recognizing that proteins or polypeptides may have multiple activities or functions). It is specifically contemplated that a modified/variant protein or polypeptide may be altered with respect to one activity or function yet retain a wild-type activity or function in other respects, such as immunogenicity. The term polypeptide also includes and antibody fragment described herein as well as antibody domains, such as HCDR1, HCDR2, HCDR3, LCDR1, LCDR2, LCDR3, HFRW1, HFRW2, HFRW3, HFRW4, LFRW1, LFRW2, LFRW3, LFRW4, VH, VL, CH, or CL.

[0307] Where a protein is specifically mentioned herein, it is in general a reference to a native (wild-type) or recombinant (modified) protein or, optionally, a protein in which any signal sequence has been removed. The protein may be isolated directly from the organism of which it is native, produced by recombinant DNA/exogenous expression methods, or produced by solid-phase peptide synthesis (SPPS) or other in vitro methods. Also described are isolated nucleic acid segments and recombinant vectors incorporating nucleic acid sequences that encode a polypeptide (e.g., an antibody or fragment thereof). The term “recombinant” may be used in conjunction with a polypeptide or the name of a specific polypeptide, and this generally refers to a polypeptide produced from a nucleic acid molecule that has been manipulated in vitro or that is a replication product of such a molecule.

[0308] The size of an antibody, antigen binding fragment, protein or polypeptide (wild-type or modified) may comprise, but is not limited to, 5, 6, 7, 8, 9, 10, 11, 12, 13, 14, 15, 16, 17, 18, 19, 20, 21, 22, 23, 24, 25, 26, 27, 28, 29, 30, 31, 32, 33, 34, 35, 36, 37, 38, 39, 40, 41, 42, 43, 44, 45, 46, 47, 48, 49, 50, 51, 52, 53, 54, 55, 56, 57, 58, 59, 60, 61, 62, 63, 64, 65, 66, 67, 68, 69, 70, 71, 72, 73, 74, 75, 76, 77, 78, 79, 80, 81, 82, 83, 84, 85, 86, 87, 88, 89, 90, 91, 92, 93, 94, 95, 96, 97, 98, 99, 100, 110, 120, 130, 140, 150, 160, 170, 180, 190, 200, 210, 220, 230, 240, 250, 275, 300, 325, 350, 375, 400, 425, 450, 475, 500, 525, 550, 575, 600, 625, 650, 675, 700, 725, 750, 775, 800, 825, 850, 875, 900, 925, 950, 975, 1000, 1100, 1200, 1300, 1400, 1500, 1750, 2000, 2250, 2500 amino acid residues or greater, and any range derivable therein, or derivative of a corresponding amino sequence described or referenced herein. It is contemplated that polypeptides may be mutated by truncation, rendering them shorter than their corresponding wild-type form, also, they might be altered by fusing or conjugating a heterologous protein or polypeptide sequence with a particular function (e.g., for targeting or localization, for enhanced immunogenicity, for purification purposes, etc.). As used herein, the term “domain” refers to any distinct functional or structural unit of a protein or polypeptide, and generally refers to a sequence of amino acids with a structure or function recognizable by one skilled in the art.

[0309] The antibody, antigen binding fragment, polypeptides, proteins, or polynucleotides encoding such polypeptides or proteins of the disclosure may include 1, 2, 3, 4, 5, 6, 7, 8, 9, 10, 11, 12, 13, 14, 15, 16, 17, 18, 19, 20, 21, 22, 23, 24, 25, 26, 27, 28, 29, 30, 31, 32, 33, 34, 35, 36, 37, 38, 39, 40, 41, 42, 43, 44, 45, 46, 47, 48, 49, or 50 (or any derivable range therein) or more variant amino acids or nucleic acid substitutions or be at least 60%, 61%, 62%, 63%, 64%, 65%, 66%, 67%, 68%, 69%, 70%, 71%, 72%, 73%, 74%, 75%, 76%, 77%, 78%, 79%, 80%, 81%, 82%, 83%, 84%, 85%, 86%, 87%, 88%, 89%, 90%, 91%, 92%, 93%, 94%, 95%, 96%, 97%, 98%, 99%, or 100% (or any derivable range therein) similar, identical, or homologous with at least, or at most 3, 4, 5, 6, 7, 8, 9, 10, 11, 12, 13, 14, 15, 16, 17, 18, 19, 20, 21, 22, 23, 24, 25, 26, 27, 28, 29, 30, 31, 32, 33, 34, 35, 36, 37, 38, 39, 40, 41, 42, 43, 44, 45, 46, 47, 48, 49, 50, 51, 52, 53, 54, 55, 56, 57, 58, 59, 60, 61, 62, 63, 64, 65, 66, 67, 68, 69, 70, 71, 72, 73, 74, 75, 76, 77, 78, 79, 80, 81, 82, 83, 84, 85, 86, 87, 88, 89, 90, 91, 92, 93, 94, 95, 96, 97, 98, 99, 100, 101, 102, 103, 104, 105, 106, 107, 108, 109, 110, 111, 112, 113, 114, 115, 116, 117, 118, 119, 120, 121, 122, 123, 124, 125, 126, 127, 128, 129, 130, 131, 132, 133, 134, 135, 136, 137, 138, 139, 140, 141, 142, 143, 144, 145, 146, 147, 148, 149, 150, 151, 152, 153, 154, 155, 156, 157, 158, 159, 160, 161, 162, 163, 164, 165, 166, 167, 168, 169, 170, 171, 172, 173, 174, 175, 176, 177, 178, 179, 180, 181, 182, 183, 184, 185, 186, 187, 188, 189, 190, 191, 192, 193, 194, 195, 196, 197, 198, 199, 200, 201, 202, 203, 204, 205, 206, 207, 208, 209, 210, 211, 212, 213, 214, 215, 216, 217, 218, 219, 220, 221, 222, 223, 224, 225, 226, 227, 228, 229, 230, 231, 232, 233, 234, 235, 236, 237, 238, 239, 240, 241, 242, 243, 244, 245, 246, 247, 248, 249, 250, 300, 400, 500, 550, 1000 or more contiguous amino acids or nucleic acids, or any range derivable therein, of SEQ ID NO: 1-3028.

[0310] The antibody, antigen binding fragment, protein, or polypeptide may comprise amino acids 1 to 2, 3, 4, 5, 6, 7, 8, 9, 10, 11, 12, 13, 14, 15, 16, 17, 18, 19, 20, 21, 22, 23, 24, 25, 26, 27, 28, 29, 30, 31, 32, 33, 34, 35, 36, 37, 38, 39, 40, 41, 42, 43, 44, 45, 46, 47, 48, 49, 50, 51, 52, 53, 54, 55, 56, 57, 58, 59, 60, 61, 62, 63, 64, 65, 66, 67, 68, 69, 70, 71, 72, 73, 74, 75, 76, 77, 78, 79, 80, 81, 82, 83, 84, 85, 86, 87, 88, 89, 90, 91, 92, 93, 94, 95, 96, 97, 98, 99, 100, 101, 102, 103, 104, 105, 106, 107, 108, 109, 110, 111, 112, 113, 114, 115, 116, 117, 118, 119, 120, 121, 122, 123, 124, 125, 126, 127, 128, 129, 130, 131, 132, 133, 134, 135, 136, 137, 138, 139, 140, 141, 142, 143, 144, 145, 146, 147, 148, 149, 150, 151, 152, 153, 154, 155, 156, 157, 158, 159, 160, 161, 162, 163, 164, 165, 166, 167, 168, 169, 170, 171, 172, 173, 174, 175, 176, 177, 178, 179, 180, 181, 182, 183, 184, 185, 186, 187, 188, 189, 190, 191, 192, 193, 194, 195, 196, 197, 198, 199, 200, 201, 202, 203, 204, 205, 206, 207, 208, 209, 210, 211, 212, 213, 214, 215, 216, 217, 218, 219, 220, 221, 222, 223, 224, 225, 226, 227, 228, 229, 230, 231, 232, 233, 234, 235, 236, 237, 238, 239, 240, 241, 242, 243, 244, 245, 246, 247, 248, 249, 250, 251, 252, 253, 254, 255, 256, 257, 258, 259, 260, 261, 262, 263, 264, 265, 266, 267, 268, 269, 270, 271, 272, 273, 274, 275, 276, 277, 278, 279, 280, 281, 282, 283, 284, 285, 286, 287, 288, 289, 290, 291, 292, 293, 294, 295, 296, 297, 298, 299, 300, 301, 302, 303, 304, 305, 306, 307, 308, 309, 310, 311, 312, 313, 314, 315, 316, 317, 318, 319, 320, 321, 322, 323, 324, 325, 326, 327, 328, 329, 330, 331, 332, 333, 334, 335, 336, 337, 338, 339, 340, 341, 342, 343, 344, 345, 346, 347, 348, 349, 350, 351, 352, 353, 354, 355, 356, 357, 358, 359, 360, 361, 362, 363, 364, 365, 366, 367, 368, 369, 370, 371, 372, 373, 374, 375, 376, 377, 378, 379, 380, 381, 382, 383, 384, 385, 386, 387, 388, 389, 390, 391, 392, 393, 394, 395, 396, 397, 398, 399, 400, 401, 402, 403, 404, 405, 406, 407, 408, 409, 410, 411, 412, 413, 414, 415, 416, 417, 418, 419, 420, 421, 422, 423, 424, 425, 426, 427, 428, 429, 430, 431, 432, 433, 434, 435, 436, 437, 438, 439, 440, 441, 442, 443, 444, 445, 446, 447, 448, 449, 450, 451, 452, 453, 454, 455, 456, 457, 458, 459, 460, 461, 462, 463, 464, 465, 466, 467, 468, 469, 470, 471, 472, 473, 474, 475, 476, 477, 478, 479, 480, 481, 482, 483, 484, 485, 486, 487, 488, 489, 490, 491, 492, 493, 494, 495, 496, 497, 498, 499, 500, 501, 502, 503, 504, 505, 506, 507, 508, 509, 510, 511, 512, 513, 514, 515, 516, 517, 518, 519, 520, 521, 522, 523, 524, 525, 526, 527, 528, 529, 530, 531, 532, 533, 534, 535, 536, 537, 538, 539, 540, 541, 542, 543, 544, 545, 546, 547, 548, 549, 550, 551, 552, 553, 554, 555, 556, 557, 558, 559, 560, 561, 562, 563, 564, 565, 566, 567, 568, 569, 570, 571, 572, 573, 574, 575, 576, 577, 578, 579, 580, 581, 582, 583, 584, 585, 586, 587, 588, 589, 590, 591, 592, 593, 594, 595, 596, 597, 598, 599, 600, 601, 602, 603, 604, 605, 606, 607, 608, 609, 610, 611, 612, 613, 614, 615, 616, 617, 618, 619, 620, 621, 622, 623, 624, 625, 626, 627, 628, 629, 630, 631, 632, 633, 634, 635, 636, 637, 638, 639, 640, 641, 642, 643, 644, 645, 646, 647, 648, 649, 650, 651, 652, 653, 654, 655, 656, 657, 658, 659, 660, 661, 662, 663, 664, 665, 666, 667, 668, 669, 670, 671, 672, 673, 674, 675, 676, 677, 678, 679, 680, 681, 682, 683, 684, 685, 686, 687, 688, 689, 690, 691, 692, 693, 694, 695, 696, 697, 698, 699, 700, 701, 702, 703, 704, 705, 706, 707, 708, 709, 710, 711, 712, 713, 714, 715, 716, 717, 718, 719, 720, 721, 722, 723, 724, 725, 726, 727, 728, 729, 730, 731, 732, 733, 734, 735, 736, 737, 738, 739, 740, 741, 742, 743, 744, 745, 746, 747, 748, 749, 750, 751, 752, 753, 754, 755, 756, 757, 758, 759, 760, 761, 762, 763, 764, 765, 766, 767, 768, 769, 770, 771, 772, 773, 774, 775, 776, 777, 778, 779, 780, 781, 782, 783, 784, 785, 786, 787, 788, 789, 790, 791, 792, 793, 794, 795, 796, 797, 798, 799, 800, 801, 802, 803, 804, 805, 806, 807, 808, 809, 810, 811, 812, 813, 814, 815, 816, 817, 818, 819, 820, 821, 822, 823, 824, 825, 826, 827, 828, 829, 830, 831, 832, 833, 834, 835, 836, 837, 838, 839, 840, 841, 842, 843, 844, 845, 846, 847, 848, 849, 850, 851, 852, 853, 854, 855, 856, 857, 858, 859, 860, 861, 862, 863, 864, 865, 866, 867, 868, 869, 870, 871, 872, 873, 874, 875, 876, 877, 878, 879, 880, 881, 882, 883, 884, 885, 886, 887, 888, 889, 890, 891, 892, 893, 894, 895, 896, 897, 898, 899, 900, 901, 902, 903, 904, 905, 906, 907, 908, 909, 910, 911, 912, 913, 914, 915, 916, 917, 918, 919, 920, 921, 922, 923, 924, 925, 926, 927, 928, 929, 930, 931, 932, 933, 934, 935, 936, 937, 938, 939, 940, 941, 942, 943, 944, 945, 946, 947, 948, 949, 950, 951, 952, 953, 954, 955, 956, 957, 958, 959, 960, 961, 962, 963, 964, 965, 966, 967, 968, 969, 970, 971, 972, 973, 974, 975, 976, 977, 978, 979, 980, 981, 982, 983, 984, 985, 986, 987, 988, 989, 990, 991, 992, 993, 994, 995, 996, 997, 998, 999, or 1000, (or any derivable range therein) of SEQ ID NOS: 1-3028.

[0311] The antibody, antigen binding fragment, or polypeptide may comprise 1, 2, 3, 4, 5, 6, 7, 8, 9, 10, 11, 12, 13, 14, 15, 16, 17, 18, 19, 20, 21, 22, 23, 24, 25, 26, 27, 28, 29, 30, 31, 32, 33, 34, 35, 36, 37, 38, 39, 40, 41, 42, 43, 44, 45, 46, 47, 48, 49, 50, 51, 52, 53, 54, 55, 56, 57, 58, 59, 60, 61, 62, 63, 64, 65, 66, 67, 68, 69, 70, 71, 72, 73, 74, 75, 76, 77, 78, 79, 80, 81, 82, 83, 84, 85, 86, 87, 88, 89, 90, 91, 92, 93, 94, 95, 96, 97, 98, 99, 100, 101, 102, 103, 104, 105, 106, 107, 108, 109, 110, 111, 112, 113, 114, 115, 116, 117, 118, 119, 120, 121, 122, 123, 124, 125, 126, 127, 128, 129, 130, 131, 132, 133, 134, 135, 136, 137, 138, 139, 140, 141, 142, 143, 144, 145, 146, 147, 148, 149, 150, 151, 152, 153, 154, 155, 156, 157, 158, 159, 160, 161, 162, 163, 164, 165, 166, 167, 168, 169, 170, 171, 172, 173, 174, 175, 176, 177, 178, 179, 180, 181, 182, 183, 184, 185, 186, 187, 188, 189, 190, 191, 192, 193, 194, 195, 196, 197, 198, 199, 200, 201, 202, 203, 204, 205, 206, 207, 208, 209, 210, 211, 212, 213, 214, 215, 216, 217, 218, 219, 220, 221, 222, 223, 224, 225, 226, 227, 228, 229, 230, 231, 232, 233, 234, 235, 236, 237, 238, 239, 240, 241, 242, 243, 244, 245, 246, 247, 248, 249, 250, 251, 252, 253, 254, 255, 256, 257, 258, 259, 260, 261, 262, 263, 264, 265, 266, 267, 268, 269, 270, 271, 272, 273, 274, 275, 276, 277, 278, 279, 280, 281, 282, 283, 284, 285, 286, 287, 288, 289, 290, 291, 292, 293, 294, 295, 296, 297, 298, 299, 300, 301, 302, 303, 304, 305, 306, 307, 308, 309, 310, 311, 312, 313, 314, 315, 316, 317, 318, 319, 320, 321, 322, 323, 324, 325, 326, 327, 328, 329, 330, 331, 332, 333, 334, 335, 336, 337, 338, 339, 340, 341, 342, 343, 344, 345, 346, 347, 348, 349, 350, 351, 352, 353, 354, 355, 356, 357, 358, 359, 360, 361, 362, 363, 364, 365, 366, 367, 368, 369, 370, 371, 372, 373, 374, 375, 376, 377, 378, 379, 380, 381, 382, 383, 384, 385, 386, 387, 388, 389, 390, 391, 392, 393, 394, 395, 396, 397, 398, 399, 400, 401, 402, 403, 404, 405, 406, 407, 408, 409, 410, 411, 412, 413, 414, 415, 416, 417, 418, 419, 420, 421, 422, 423, 424, 425, 426, 427, 428, 429, 430, 431, 432, 433, 434, 435, 436, 437, 438, 439, 440, 441, 442, 443, 444, 445, 446, 447, 448, 449, 450, 451, 452, 453, 454, 455, 456, 457, 458, 459, 460, 461, 462, 463, 464, 465, 466, 467, 468, 469, 470, 471, 472, 473, 474, 475, 476, 477, 478, 479, 480, 481, 482, 483, 484, 485, 486, 487, 488, 489, 490, 491, 492, 493, 494, 495, 496, 497, 498, 499, 500, 501, 502, 503, 504, 505, 506, 507, 508, 509, 510, 511, 512, 513, 514, 515, 516, 517, 518, 519, 520, 521, 522, 523, 524, 525, 526, 527, 528, 529, 530, 531, 532, 533, 534, 535, 536, 537, 538, 539, 540, 541, 542, 543, 544, 545, 546, 547, 548, 549, 550, 551, 552, 553, 554, 555, 556, 557, 558, 559, 560, 561, 562, 563, 564, 565, 566, 567, 568, 569, 570, 571, 572, 573, 574, 575, 576, 577, 578, 579, 580, 581, 582, 583, 584, 585, 586, 587, 588, 589, 590, 591, 592, 593, 594, 595, 596, 597, 598, 599, 600, 601, 602, 603, 604, 605, 606, 607, 608, 609, 610, 611, 612, 613, 614, 615, 616, 617, 618, 619, 620, 621, 622, 623, 624, 625, 626, 627, 628, 629, 630, 631, 632, 633, 634, 635, 636, 637, 638, 639, 640, 641, 642, 643, 644, 645, 646, 647, 648, 649, 650, 651, 652, 653, 654, 655, 656, 657, 658, 659, 660, 661, 662, 663, 664, 665, 666, 667, 668, 669, 670, 671, 672, 673, 674, 675, 676, 677, 678, 679, 680, 681, 682, 683, 684, 685, 686, 687, 688, 689, 690, 691, 692, 693, 694, 695, 696, 697, 698, 699, 700, 701, 702, 703, 704, 705, 706, 707, 708, 709, 710, 711, 712, 713, 714, 715, 716, 717, 718, 719, 720, 721, 722, 723, 724, 725, 726, 727, 728, 729, 730, 731, 732, 733, 734, 735, 736, 737, 738, 739, 740, 741, 742, 743, 744, 745, 746, 747, 748, 749, 750, 751, 752, 753, 754, 755, 756, 757, 758, 759, 760, 761, 762, 763, 764, 765, 766, 767, 768, 769, 770, 771, 772, 773, 774, 775, 776, 777, 778, 779, 780, 781, 782, 783, 784, 785, 786, 787, 788, 789, 790, 791, 792, 793, 794, 795, 796, 797, 798, 799, 800, 801, 802, 803, 804, 805, 806, 807, 808, 809, 810, 811, 812, 813, 814, 815, 816, 817, 818, 819, 820, 821, 822, 823, 824, 825, 826, 827, 828, 829, 830, 831, 832, 833, 834, 835, 836, 837, 838, 839, 840, 841, 842, 843, 844, 845, 846, 847, 848, 849, 850, 851, 852, 853, 854, 855, 856, 857, 858, 859, 860, 861, 862, 863, 864, 865, 866, 867, 868, 869, 870, 871, 872, 873, 874, 875, 876, 877, 878, 879, 880, 881, 882, 883, 884, 885, 886, 887, 888, 889, 890, 891, 892, 893, 894, 895, 896, 897, 898, 899, 900, 901, 902, 903, 904, 905, 906, 907, 908, 909, 910, 911, 912, 913, 914, 915, 916, 917, 918, 919, 920, 921, 922, 923, 924, 925, 926, 927, 928, 929, 930, 931, 932, 933, 934, 935, 936, 937, 938, 939, 940, 941, 942, 943, 944, 945, 946, 947, 948, 949, 950, 951, 952, 953, 954, 955, 956, 957, 958, 959, 960, 961, 962, 963, 964, 965, 966, 967, 968, 969, 970, 971, 972, 973, 974, 975, 976, 977, 978, 979, 980, 981, 982, 983, 984, 985, 986, 987, 988, 989, 990, 991, 992, 993, 994, 995, 996, 997, 998, 999, or 1000, (or any derivable range therein) contiguous amino acids of SEQ ID NOs: 1-2706.

[0312] The antibody, antigen binding fragment, protein, or polypeptide may comprise at least, at most, or exactly 1, 2, 3, 4, 5, 6, 7, 8, 9, 10, 11, 12, 13, 14, 15, 16, 17, 18, 19, 20, 21, 22, 23, 24, 25, 26, 27, 28, 29, 30, 31, 32, 33, 34, 35, 36, 37, 38, 39, 40, 41, 42, 43, 44, 45, 46, 47, 48, 49, 50, 51, 52, 53, 54, 55, 56, 57, 58, 59, 60, 61, 62, 63, 64, 65, 66, 67, 68, 69, 70, 71, 72, 73, 74, 75, 76, 77, 78, 79, 80, 81, 82, 83, 84, 85, 86, 87, 88, 89, 90, 91, 92, 93, 94, 95, 96, 97, 98, 99, 100, 101, 102, 103, 104, 105, 106, 107, 108, 109, 110, 111, 112, 113, 114, 115, 116, 117, 118, 119, 120, 121, 122, 123, 124, 125, 126, 127, 128, 129, 130, 131, 132, 133, 134, 135, 136, 137, 138, 139, 140, 141, 142, 143, 144, 145, 146, 147, 148, 149, 150, 151, 152, 153, 154, 155, 156, 157, 158, 159, 160, 161, 162, 163, 164, 165, 166, 167, 168, 169, 170, 171, 172, 173, 174, 175, 176, 177, 178, 179, 180, 181, 182, 183, 184, 185, 186, 187, 188, 189, 190, 191, 192, 193, 194, 195, 196, 197, 198, 199, 200, 201, 202, 203, 204, 205, 206, 207, 208, 209, 210, 211, 212, 213, 214, 215, 216, 217, 218, 219, 220, 221, 222, 223, 224, 225, 226, 227, 228, 229, 230, 231, 232, 233, 234, 235, 236, 237, 238, 239, 240, 241, 242, 243, 244, 245, 246, 247, 248, 249, 250, 251, 252, 253, 254, 255, 256, 257, 258, 259, 260, 261, 262, 263, 264, 265, 266, 267, 268, 269, 270, 271, 272, 273, 274, 275, 276, 277, 278, 279, 280, 281, 282, 283, 284, 285, 286, 287, 288, 289, 290, 291, 292, 293, 294, 295, 296, 297, 298, 299, 300, 301, 302, 303, 304, 305, 306, 307, 308, 309, 310, 311, 312, 313, 314, 315, 316, 317, 318, 319, 320, 321, 322, 323, 324, 325, 326, 327, 328, 329, 330, 331, 332, 333, 334, 335, 336, 337, 338, 339, 340, 341, 342, 343, 344, 345, 346, 347, 348, 349, 350, 351, 352, 353, 354, 355, 356, 357, 358, 359, 360, 361, 362, 363, 364, 365, 366, 367, 368, 369, 370, 371, 372, 373, 374, 375, 376, 377, 378, 379, 380, 381, 382, 383, 384, 385, 386, 387, 388, 389, 390, 391, 392, 393, 394, 395, 396, 397, 398, 399, 400, 401, 402, 403, 404, 405, 406, 407, 408, 409, 410, 411, 412, 413, 414, 415, 416, 417, 418, 419, 420, 421, 422, 423, 424, 425, 426, 427, 428, 429, 430, 431, 432, 433, 434, 435, 436, 437, 438, 439, 440, 441, 442, 443, 444, 445, 446, 447, 448, 449, 450, 451, 452, 453, 454, 455, 456, 457, 458, 459, 460, 461, 462, 463, 464, 465, 466, 467, 468, 469, 470, 471, 472, 473, 474, 475, 476, 477, 478, 479, 480, 481, 482, 483, 484, 485, 486, 487, 488, 489, 490, 491, 492, 493, 494, 495, 496, 497, 498, 499, 500, 501, 502, 503, 504, 505, 506, 507, 508, 509, 510, 511, 512, 513, 514, 515, 516, 517, 518, 519, 520, 521, 522, 523, 524, 525, 526, 527, 528, 529, 530, 531, 532, 533, 534, 535, 536, 537, 538, 539, 540, 541, 542, 543, 544, 545, 546, 547, 548, 549, 550, 551, 552, 553, 554, 555, 556, 557, 558, 559, 560, 561, 562, 563, 564, 565, 566, 567, 568, 569, 570, 571, 572, 573, 574, 575, 576, 577, 578, 579, 580, 581, 582, 583, 584, 585, 586, 587, 588, 589, 590, 591, 592, 593, 594, 595, 596, 597, 598, 599, 600, 601, 602, 603, 604, 605, 606, 607, 608, 609, 610, 611, 612, 613, 614, 615, 616, 617, 618, 619, 620, 621, 622, 623, 624, 625, 626, 627, 628, 629, 630, 631, 632, 633, 634, 635, 636, 637, 638, 639, 640, 641, 642, 643, 644, 645, 646, 647, 648, 649, 650, 651, 652, 653, 654, 655, 656, 657, 658, 659, 660, 661, 662, 663, 664, 665, 666, 667, 668, 669, 670, 671, 672, 673, 674, 675, 676, 677, 678, 679, 680, 681, 682, 683, 684, 685, 686, 687, 688, 689, 690, 691, 692, 693, 694, 695, 696, 697, 698, 699, 700, 701, 702, 703, 704, 705, 706, 707, 708, 709, 710, 711, 712, 713, 714, 715, 716, 717, 718, 719, 720, 721, 722, 723, 724, 725, 726, 727, 728, 729, 730, 731, 732, 733, 734, 735, 736, 737, 738, 739, 740, 741, 742, 743, 744, 745, 746, 747, 748, 749, 750, 751, 752, 753, 754, 755, 756, 757, 758, 759, 760, 761, 762, 763, 764, 765, 766, 767, 768, 769, 770, 771, 772, 773, 774, 775, 776, 777, 778, 779, 780, 781, 782, 783, 784, 785, 786, 787, 788, 789, 790, 791, 792, 793, 794, 795, 796, 797, 798, 799, 800, 801, 802, 803, 804, 805, 806, 807, 808, 809, 810, 811, 812, 813, 814, 815, 816, 817, 818, 819, 820, 821, 822, 823, 824, 825, 826, 827, 828, 829, 830, 831, 832, 833, 834, 835, 836, 837, 838, 839, 840, 841, 842, 843, 844, 845, 846, 847, 848, 849, 850, 851, 852, 853, 854, 855, 856, 857, 858, 859, 860, 861, 862, 863, 864, 865, 866, 867, 868, 869, 870, 871, 872, 873, 874, 875, 876, 877, 878, 879, 880, 881, 882, 883, 884, 885, 886, 887, 888, 889, 890, 891, 892, 893, 894, 895, 896, 897, 898, 899, 900, 901, 902, 903, 904, 905, 906, 907, 908, 909, 910, 911, 912, 913, 914, 915, 916, 917, 918, 919, 920, 921, 922, 923, 924, 925, 926, 927, 928, 929, 930, 931, 932, 933, 934, 935, 936, 937, 938, 939, 940, 941, 942, 943, 944, 945, 946, 947, 948, 949, 950, 951, 952, 953, 954, 955, 956, 957, 958, 959, 960, 961, 962, 963, 964, 965, 966, 967, 968, 969, 970, 971, 972, 973, 974, 975, 976, 977, 978, 979, 980, 981, 982, 983, 984, 985, 986, 987, 988, 989, 990, 991, 992, 993, 994, 995, 996, 997, 998, 999, or 1000 (or any derivable range therein) contiguous amino acids of SEQ ID NOS: 1-3028 that are at least, at most, or exactly 60%, 61%, 62%, 63%, 64%, 65%, 66%, 67%, 68%, 69%, 70%, 71%, 72%, 73%, 74%, 75%, 76%, 77%, 78%, 79%, 80%, 81%, 82%, 83%, 84%, 85%, 86%, 87%, 88%, 89%, 90%, 91%, 92%, 93%, 94%, 95%, 96%, 97%, 98%, 99%, or 100% (or any derivable range therein) similar, identical, or homologous with one of SEQ ID NOS: 1-3028.

[0313] Also provided is a nucleic acid molecule, antibody, antigen binding fragment, protein, or polypeptide starting at position 1, 2, 3, 4, 5, 6, 7, 8, 9, 10, 11, 12, 13, 14, 15, 16, 17, 18, 19, 20, 21, 22, 23, 24, 25, 26, 27, 28, 29, 30, 31, 32, 33, 34, 35, 36, 37, 38, 39, 40, 41, 42, 43, 44, 45, 46, 47, 48, 49, 50, 51, 52, 53, 54, 55, 56, 57, 58, 59, 60, 61, 62, 63, 64, 65, 66, 67, 68, 69, 70, 71, 72, 73, 74, 75, 76, 77, 78, 79, 80, 81, 82, 83, 84, 85, 86, 87, 88, 89, 90, 91, 92, 93, 94, 95, 96, 97, 98, 99, 100, 101, 102, 103, 104, 105, 106, 107, 108, 109, 110, 111, 112, 113, 114, 115, 116, 117, 118, 119, 120, 121, 122, 123, 124, 125, 126, 127, 128, 129, 130, 131, 132, 133, 134, 135, 136, 137, 138, 139, 140, 141, 142, 143, 144, 145, 146, 147, 148, 149, 150, 151, 152, 153, 154, 155, 156, 157, 158, 159, 160, 161, 162, 163, 164, 165, 166, 167, 168, 169, 170, 171, 172, 173, 174, 175, 176, 177, 178, 179, 180, 181, 182, 183, 184, 185, 186, 187, 188, 189, 190, 191, 192, 193, 194, 195, 196, 197, 198, 199, 200, 201, 202, 203, 204, 205, 206, 207, 208, 209, 210, 211, 212, 213, 214, 215, 216, 217, 218, 219, 220, 221, 222, 223, 224, 225, 226, 227, 228, 229, 230, 231, 232, 233, 234, 235, 236, 237, 238, 239, 240, 241, 242, 243, 244, 245, 246, 247, 248, 249, 250, 251, 252, 253, 254, 255, 256, 257, 258, 259, 260, 261, 262, 263, 264, 265, 266, 267, 268, 269, 270, 271, 272, 273, 274, 275, 276, 277, 278, 279, 280, 281, 282, 283, 284, 285, 286, 287, 288, 289, 290, 291, 292, 293, 294, 295, 296, 297, 298, 299, 300, 301, 302, 303, 304, 305, 306, 307, 308, 309, 310, 311, 312, 313, 314, 315, 316, 317, 318, 319, 320, 321, 322, 323, 324, 325, 326, 327, 328, 329, 330, 331, 332, 333, 334, 335, 336, 337, 338, 339, 340, 341, 342, 343, 344, 345, 346, 347, 348, 349, 350, 351, 352, 353, 354, 355, 356, 357, 358, 359, 360, 361, 362, 363, 364, 365, 366, 367, 368, 369, 370, 371, 372, 373, 374, 375, 376, 377, 378, 379, 380, 381, 382, 383, 384, 385, 386, 387, 388, 389, 390, 391, 392, 393, 394, 395, 396, 397, 398, 399, 400, 401, 402, 403, 404, 405, 406, 407, 408, 409, 410, 411, 412, 413, 414, 415, 416, 417, 418, 419, 420, 421, 422, 423, 424, 425, 426, 427, 428, 429, 430, 431, 432, 433, 434, 435, 436, 437, 438, 439, 440, 441, 442, 443, 444, 445, 446, 447, 448, 449, 450, 451, 452, 453, 454, 455, 456, 457, 458, 459, 460, 461, 462, 463, 464, 465, 466, 467, 468, 469, 470, 471, 472, 473, 474, 475, 476, 477, 478, 479, 480, 481, 482, 483, 484, 485, 486, 487, 488, 489, 490, 491, 492, 493, 494, 495, 496, 497, 498, 499, 500, 501, 502, 503, 504, 505, 506, 507, 508, 509, 510, 511, 512, 513, 514, 515, 516, 517, 518, 519, 520, 521, 522, 523, 524, 525, 526, 527, 528, 529, 530, 531, 532, 533, 534, 535, 536, 537, 538, 539, 540, 541, 542, 543, 544, 545, 546, 547, 548, 549, 550, 551, 552, 553, 554, 555, 556, 557, 558, 559, 560, 561, 562, 563, 564, 565, 566, 567, 568, 569, 570, 571, 572, 573, 574, 575, 576, 577, 578, 579, 580, 581, 582, 583, 584, 585, 586, 587, 588, 589, 590, 591, 592, 593, 594, 595, 596, 597, 598, 599, 600, 601, 602, 603, 604, 605, 606, 607, 608, 609, 610, 611, 612, 613, 614, 615, 616, 617, 618, 619, 620, 621, 622, 623, 624, 625, 626, 627, 628, 629, 630, 631, 632, 633, 634, 635, 636, 637, 638, 639, 640, 641, 642, 643, 644, 645, 646, 647, 648, 649, 650, 651, 652, 653, 654, 655, 656, 657, 658, 659, 660, 661, 662, 663, 664, 665, 666, 667, 668, 669, 670, 671, 672, 673, 674, 675, 676, 677, 678, 679, 680, 681, 682, 683, 684, 685, 686, 687, 688, 689, 690, 691, 692, 693, 694, 695, 696, 697, 698, 699, 700, 701, 702, 703, 704, 705, 706, 707, 708, 709, 710, 711, 712, 713, 714, 715, 716, 717, 718, 719, 720, 721, 722, 723, 724, 725, 726, 727, 728, 729, 730, 731, 732, 733, 734, 735, 736, 737, 738, 739, 740, 741, 742, 743, 744, 745, 746, 747, 748, 749, 750, 751, 752, 753, 754, 755, 756, 757, 758, 759, 760, 761, 762, 763, 764, 765, 766, 767, 768, 769, 770, 771, 772, 773, 774, 775, 776, 777, 778, 779, 780, 781, 782, 783, 784, 785, 786, 787, 788, 789, 790, 791, 792, 793, 794, 795, 796, 797, 798, 799, 800, 801, 802, 803, 804, 805, 806, 807, 808, 809, 810, 811, 812, 813, 814, 815, 816, 817, 818, 819, 820, 821, 822, 823, 824, 825, 826, 827, 828, 829, 830, 831, 832, 833, 834, 835, 836, 837, 838, 839, 840, 841, 842, 843, 844, 845, 846, 847, 848, 849, 850, 851, 852, 853, 854, 855, 856, 857, 858, 859, 860, 861, 862, 863, 864, 865, 866, 867, 868, 869, 870, 871, 872, 873, 874, 875, 876, 877, 878, 879, 880, 881, 882, 883, 884, 885, 886, 887, 888, 889, 890, 891, 892, 893, 894, 895, 896, 897, 898, 899, 900, 901, 902, 903, 904, 905, 906, 907, 908, 909, 910, 911, 912, 913, 914, 915, 916, 917, 918, 919, 920, 921, 922, 923, 924, 925, 926, 927, 928, 929, 930, 931, 932, 933, 934, 935, 936, 937, 938, 939, 940, 941, 942, 943, 944, 945, 946, 947, 948, 949, 950, 951, 952, 953, 954, 955, 956, 957, 958, 959, 960, 961, 962, 963, 964, 965, 966, 967, 968, 969, 970, 971, 972, 973, 974, 975, 976, 977, 978, 979, 980, 981, 982, 983, 984, 985, 986, 987, 988, 989, 990, 991, 992, 993, 994, 995, 996, 997, 998, 999, or 1000 of any of SEQ ID NOS: 1-3028 and comprising at least, at most, or exactly 2, 3, 4, 5, 6, 7, 8, 9, 10, 11, 12, 13, 14, 15, 16, 17, 18, 19, 20, 21, 22, 23, 24, 25, 26, 27, 28, 29, 30, 31, 32, 33, 34, 35, 36, 37, 38, 39, 40, 41, 42, 43, 44, 45, 46, 47, 48, 49, 50, 51, 52, 53, 54, 55, 56, 57, 58, 59, 60, 61, 62, 63, 64, 65, 66, 67, 68, 69, 70, 71, 72, 73, 74, 75, 76, 77, 78, 79, 80, 81, 82, 83, 84, 85, 86, 87, 88, 89, 90, 91, 92, 93, 94, 95, 96, 97, 98, 99, 100, 101, 102, 103, 104, 105, 106, 107, 108, 109, 110, 111, 112, 113, 114, 115, 116, 117, 118, 119, 120, 121, 122, 123, 124, 125, 126, 127, 128, 129, 130, 131, 132, 133, 134, 135, 136, 137, 138, 139, 140, 141, 142, 143, 144, 145, 146, 147, 148, 149, 150, 151, 152, 153, 154, 155, 156, 157, 158, 159, 160, 161, 162, 163, 164, 165, 166, 167, 168, 169, 170, 171, 172, 173, 174, 175, 176, 177, 178, 179, 180, 181, 182, 183, 184, 185, 186, 187, 188, 189, 190, 191, 192, 193, 194, 195, 196, 197, 198, 199, 200, 201, 202, 203, 204, 205, 206, 207, 208, 209, 210, 211, 212, 213, 214, 215, 216, 217, 218, 219, 220, 221, 222, 223, 224, 225, 226, 227, 228, 229, 230, 231, 232, 233, 234, 235, 236, 237, 238, 239, 240, 241, 242, 243, 244, 245, 246, 247, 248, 249, 250, 251, 252, 253, 254, 255, 256, 257, 258, 259, 260, 261, 262, 263, 264, 265, 266, 267, 268, 269, 270, 271, 272, 273, 274, 275, 276, 277, 278, 279, 280, 281, 282, 283, 284, 285, 286, 287, 288, 289, 290, 291, 292, 293, 294, 295, 296, 297, 298, 299, 300, 301, 302, 303, 304, 305, 306, 307, 308, 309, 310, 311, 312, 313, 314, 315, 316, 317, 318, 319, 320, 321, 322, 323, 324, 325, 326, 327, 328, 329, 330, 331, 332, 333, 334, 335, 336, 337, 338, 339, 340, 341, 342, 343, 344, 345, 346, 347, 348, 349, 350, 351, 352, 353, 354, 355, 356, 357, 358, 359, 360, 361, 362, 363, 364, 365, 366, 367, 368, 369, 370, 371, 372, 373, 374, 375, 376, 377, 378, 379, 380, 381, 382, 383, 384, 385, 386, 387, 388, 389, 390, 391, 392, 393, 394, 395, 396, 397, 398, 399, 400, 401, 402, 403, 404, 405, 406, 407, 408, 409, 410, 411, 412, 413, 414, 415, 416, 417, 418, 419, 420, 421, 422, 423, 424, 425, 426, 427, 428, 429, 430, 431, 432, 433, 434, 435, 436, 437, 438, 439, 440, 441, 442, 443, 444, 445, 446, 447, 448, 449, 450, 451, 452, 453, 454, 455, 456, 457, 458, 459, 460, 461, 462, 463, 464, 465, 466, 467, 468, 469, 470, 471, 472, 473, 474, 475, 476, 477, 478, 479, 480, 481, 482, 483, 484, 485, 486, 487, 488, 489, 490, 491, 492, 493, 494, 495, 496, 497, 498, 499, 500, 501, 502, 503, 504, 505, 506, 507, 508, 509, 510, 511, 512, 513, 514, 515, 516, 517, 518, 519, 520, 521, 522, 523, 524, 525, 526, 527, 528, 529, 530, 531, 532, 533, 534, 535, 536, 537, 538, 539, 540, 541, 542, 543, 544, 545, 546, 547, 548, 549, 550, 551, 552, 553, 554, 555, 556, 557, 558, 559, 560, 561, 562, 563, 564, 565, 566, 567, 568, 569, 570, 571, 572, 573, 574, 575, 576, 577, 578, 579, 580, 581, 582, 583, 584, 585, 586, 587, 588, 589, 590, 591, 592, 593, 594, 595, 596, 597, 598, 599, 600, 601, 602, 603, 604, 605, 606, 607, 608, 609, 610, 611, 612, 613, 614, 615, 616, 617, 618, 619, 620, 621, 622, 623, 624, 625, 626, 627, 628, 629, 630, 631, 632, 633, 634, 635, 636, 637, 638, 639, 640, 641, 642, 643, 644, 645, 646, 647, 648, 649, 650, 651, 652, 653, 654, 655, 656, 657, 658, 659, 660, 661, 662, 663, 664, 665, 666, 667, 668, 669, 670, 671, 672, 673, 674, 675, 676, 677, 678, 679, 680, 681, 682, 683, 684, 685, 686, 687, 688, 689, 690, 691, 692, 693, 694, 695, 696, 697, 698, 699, 700, 701, 702, 703, 704, 705, 706, 707, 708, 709, 710, 711, 712, 713, 714, 715, 716, 717, 718, 719, 720, 721, 722, 723, 724, 725, 726, 727, 728, 729, 730, 731, 732, 733, 734, 735, 736, 737, 738, 739, 740, 741, 742, 743, 744, 745, 746, 747, 748, 749, 750, 751, 752, 753, 754, 755, 756, 757, 758, 759, 760, 761, 762, 763, 764, 765, 766, 767, 768, 769, 770, 771, 772, 773, 774, 775, 776, 777, 778, 779, 780, 781, 782, 783, 784, 785, 786, 787, 788, 789, 790, 791, 792, 793, 794, 795, 796, 797, 798, 799, 800, 801, 802, 803, 804, 805, 806, 807, 808, 809, 810, 811, 812, 813, 814, 815, 816, 817, 818, 819, 820, 821, 822, 823, 824, 825, 826, 827, 828, 829, 830, 831, 832, 833, 834, 835, 836, 837, 838, 839, 840, 841, 842, 843, 844, 845, 846, 847, 848, 849, 850, 851, 852, 853, 854, 855, 856, 857, 858, 859, 860, 861, 862, 863, 864, 865, 866, 867, 868, 869, 870, 871, 872, 873, 874, 875, 876, 877, 878, 879, 880, 881, 882, 883, 884, 885, 886, 887, 888, 889, 890, 891, 892, 893, 894, 895, 896, 897, 898, 899, 900, 901, 902, 903, 904, 905, 906, 907, 908, 909, 910, 911, 912, 913, 914, 915, 916, 917, 918, 919, 920, 921, 922, 923, 924, 925, 926, 927, 928, 929, 930, 931, 932, 933, 934, 935, 936, 937, 938, 939, 940, 941, 942, 943, 944, 945, 946, 947, 948, 949, 950, 951, 952, 953, 954, 955, 956, 957, 958, 959, 960, 961, 962, 963, 964, 965, 966, 967, 968, 969, 970, 971, 972, 973, 974, 975, 976, 977, 978, 979, 980, 981, 982, 983, 984, 985, 986, 987, 988, 989, 990, 991, 992, 993, 994, 995, 996, 997, 998, 999, or 1000 (or any derivable range therein) contiguous amino acids or nucleotides of any of SEQ ID NOS: 1-3028.

[0314] The amino acid at position 1, 2, 3, 4, 5, 6, 7, 8, 9, 10, 11, 12, 13, 14, 15, 16, 17, 18, 19, 20, 21, 22, 23, 24, 25, 26, 27, 28, 29, 30, 31, 32, 33, 34, 35, 36, 37, 38, 39, 40, 41, 42, 43, 44, 45, 46, 47, 48, 49, 50, 51, 52, 53, 54, 55, 56, 57, 58, 59, 60, 61, 62, 63, 64, 65, 66, 67, 68, 69, 70, 71, 72, 73, 74, 75, 76, 77, 78, 79, 80, 81, 82, 83, 84, 85, 86, 87, 88, 89, 90, 91, 92, 93, 94, 95, 96, 97, 98, 99, 100, 101, 102, 103, 104, 105, 106, 107, 108, 109, 110, 111, 112, 113, 114, 115, 116, 117, 118, 119, 120, 121, 122, 123, 124, 125, 126, 127, 128, 129, 130, 131, 132, 133, 134, 135, 136, 137, 138, 139, 140, 141, 142, 143, 144, 145, 146, 147, 148, 149, 150, 151, 152, 153, 154, 155, 156, 157, 158, 159, 160, 161, 162, 163, 164, 165, 166, 167, 168, 169, 170, 171, 172, 173, 174, 175, 176, 177, 178, 179, 180, 181, 182, 183, 184, 185, 186, 187, 188, 189, 190, 191, 192, 193, 194, 195, 196, 197, 198, 199, 200, 201, 202, 203, 204, 205, 206, 207, 208, 209, 210, 211, 212, 213, 214, 215, 216, 217, 218, 219, 220, 221, 222, 223, 224, 225, 226, 227, 228, 229, 230, 231, 232, 233, 234, 235, 236, 237, 238, 239, 240, 241, 242, 243, 244, 245, 246, 247, 248, 249, 250, 251, 252, 253, 254, 255, 256, 257, 258, 259, 260, 261, 262, 263, 264, 265, 266, 267, 268, 269, 270, 271, 272, 273, 274, 275, 276, 277, 278, 279, 280, 281, 282, 283, 284, 285, 286, 287, 288, 289, 290, 291, 292, 293, 294, 295, 296, 297, 298, 299, 300, 301, 302, 303, 304, 305, 306, 307, 308, 309, 310, 311, 312, 313, 314, 315, 316, 317, 318, 319, 320, 321, 322, 323, 324, 325, 326, 327, 328, 329, 330, 331, 332, 333, 334, 335, 336, 337, 338, 339, 340, 341, 342, 343, 344, 345, 346, 347, 348, 349, 350, 351, 352, 353, 354, 355, 356, 357, 358, 359, 360, 361, 362, 363, 364, 365, 366, 367, 368, 369, 370, 371, 372, 373, 374, 375, 376, 377, 378, 379, 380, 381, 382, 383, 384, 385, 386, 387, 388, 389, 390, 391, 392, 393, 394, 395, 396, 397, 398, 399, or 400 of the heavy chain, light chain, VH, VL, HCDR1, HCDR2, HCDR3, LCDR1, LCDR2, LCDR3, HFRW1, HFRW2, HFRW3, HFRW4, LFRW1, LFRW2, LFRW3, or LFRW4 identified in Table 1 is substituted with an alanine, arginine, asparagine, aspartic acid, cysteine, glutamine, glutamic acid, glycine, histidine, isoleucine, leucine, lysine, methionine, phenylalanine, proline, serine, threonine, tryptophan, tyrosine, or valine.

[0315] A polypeptide (e.g., antibody, antibody fragment, Fab, etc.) of the disclosure comprises a CDR that is at least 65, 66, 67, 68, 69, 70, 71, 72, 73, 74, 75, 76, 77, 78, 79, 80, 81, 82, 83, 84, 85, 86, 87, 88, 89, 90, 91, 92, 93, 94, 95, 96, 97, 98, 99, or 100% identical (or any range derivable therein) in sequence to a HCDR or LCDR identified in Table 1. A polypeptide may comprise 1, 2, and/or 3 CDRs from a heavy chain or light chain variable region identified in Table 1. The CDR may be one that has been determined by Kabat, IMGT, or Chothia. A polypeptide may have CDRs that have 1, 2, and/or 3 amino acid changes (e.g., addition of 1 or 2 amino acids, deletions of 1 or 2 amino acids, substitution) with respect to these 1, 2, or 3 CDRs. A polypeptide may comprise additionally or alternatively, an amino acid sequence that is at least 60, 65, 70, 75, 80, 85, 90, 95, 96, 97, 98, 99, or 100% identical or homologous to the amino acid sequence of the variable region that is not a CDR sequence, i.e., the variable region framework.

[0316] From amino to carboxy terminus the CDRs are CDR1, CDR2, and CDR3. A polypeptide may have CDRs that have 1, 2, and/or 3 amino acid changes (e.g., addition of 1 or 2 amino acids, deletions of 1 or 2 amino acids, substitution) with respect to CDR1, CDR2, or CDR3. The CDRs identified in Table 1 may further comprise 1, 2, 3, 4, 5, or 6 additional amino acids at the amino or carboxy terminus of the CDR, The additional amino acids may be from the heavy and/or light chain framework regions of SEQ ID NOS: 44-76, that are shown as immediately adjacent to the CDRs. Accordingly, also described are polypeptides comprising an HCDR1 (i.e., CDR-H1), HCDR2 (i.e., CDR-H2), HCDR3 (i.e., CDR-H3), LCDR1 (i.e., CDR-L1), LCDR2 (i.e., CDR-L2), and/or LCDR3 (i.e., CDR-L3) with at least or at most or exactly 1, 2, 3, 4, 5, 6 or 7 amino acids at the amino end of the CDR or at the carboxy end of the CDR, wherein the additional amino acids are the 1, 2, 3, 4, 5, 6, or 7 amino acids that are shown as immediately adjacent to the CDRs in a variable region of Table 1. Also included are antibodies comprising one or more CDRs, wherein the CDR is a fragment of a CDR identified in Table 1 and wherein the fragment lacks 1, 2, 3, 4, or 5 amino acids from the amino or carboxy end of the CDR. The CDR may lack one, 2, 3, 4, 5, 6, or 7 amino acids from the carboxy end and may further comprise 1, 2, 3, 4, 5, 6, 7, or 8 amino acids from the framework region of the amino end of the CDR. The CDR may lack one, 2, 3, 4, 5, 6, or 7 amino acids from the amino end and may further comprise 1, 2, 3, 4, 5, 6, 7, or 8 amino acids from the framework region of the carboxy end of the CDR. An antibody may be alternatively or additionally humanized in regions outside the CDR(s) and/or variable region(s). A polypeptide may comprise, additionally or alternatively, an amino acid sequence that is at least 60, 65, 70, 75, 80, 85, 90, 95, 96, 97, 98, 99, or 100% identical or homologous to the amino acid sequence of the variable region that is not a CDR sequence, i.e., the variable region framework.

[0317] A polypeptide or protein may comprise 1, 2, 3, 4, 5, or 6 CDRs from either or both of the light and heavy variable regions of an antibody clone identified in Table, and 1, 2, 3, 4, 5, or 6 CDRs may have 1, 2, and/or 3 amino acid changes with respect to these CDRs. Parts or all of the antibody sequence outside the variable region may have been humanized. A protein may comprise one or more polypeptides. A protein may contain one or two polypeptides similar to a heavy chain polypeptide and/or 1 or 2 polypeptides similar to a light chain polypeptide.

[0318] The nucleotide as well as the protein, polypeptide, and peptide sequences for various genes have been previously disclosed, and may be found in the recognized computerized databases. Two commonly used databases are the National Center for Biotechnology Information's Genbank and GenPept databases (on the World Wide Web at ncbi.nlm.nih.gov/) and The Universal Protein Resource (UniProt; on the World Wide Web at uniprot.org). The coding regions for these genes may be amplified and/or expressed using the techniques disclosed herein or as would be known to those of ordinary skill in the art.

[0319] It is contemplated that in compositions of the disclosure, there is between about 0.001 mg and about 10 mg of total polypeptide, peptide, and/or protein per ml. The concentration of protein in a composition can be about, at least about or at most about 0.001, 0.010, 0.050, 0.1, 0.2, 0.3, 0.4, 0.5, 0.6, 0.7, 0.8, 0.9, 1.0, 1.5, 2.0, 2.5, 3.0, 3.5, 4.0, 4.5, 5.0, 5.5, 6.0, 6.5, 7.0, 7.5, 8.0, 8.5, 9.0, 9.5, 10.0 mg/ml or more (or any range derivable therein).

### VI. Sequences

[0320] Polypeptide, antibody, and antigen binding fragments are shown below in the following tables. In the table below, HC refers to heavy chain (including the heavy chain variable and constant regions), and LC refers to light chain (including the light chain variable and constant regions). HCDR1, HCDR2, and HCDR3 are the heavy chain complementarity-determining regions, and LCDR1, LCDR2, and LCDR3 are the light chain complementarity-determining regions. HFR1, HFR2, HFR3, and HFR4 are the framework regions of the heavy chain variable region, and LFR1, LFR2, LFR3, and LFR4 are the framework regions of the light chain variable region. HC variable refers to the heavy chain variable region, and LC variable refers to the light chain variable region.

TABLE 1
Antibody and antigen binding embodiments

| | | | SEQ |
|---|---|---|---|
| | Descrip- | | ID |
| Clone | tion | Sequence | NO: |
| S20-15 | HC | QVQLQESGPGLVRPSETLSLTCTVS | 1 |
| | | GGSISSHYWSWIRQPPGKGLEWIGY | |
| | | IYYSGSTNYNPSLKSRVTISVDTSK | |
| | | NQFSLKLISVTAADTAVYYCARAGG | |
| | | VFGVVLDFDHWGRGTLVTVSSASTK | |
| | | GPSVFPLAPSSKSTSGGTAALGCLV | |
| | | KDYFPEPVTVSWNSGALTSGVHTFP | |
| | | AVLQSSG | |
| | HC | QVQLQESGPGLVRPSETLSLTCTVS | 2 |
| | variable | GGSISSHYWSWIRQPPGKGLEWIGY | |
| | | IYYSGSTNYNPSLKSRVTISVDTSK | |
| | | NQFSLKLISVTAADTAVYYCARAGG | |
| | | VFGVVLDFDHWGRGTLVTVSS | |
| | HCDR1 | SHYWS | 3 |
| | HCDR2 | YIYYSGSTNYNPSLKS | 4 |
| | HCDR3 | AGGVFGVVLDFDH | 5 |
| | HFR1 | QVQLQESGPGLVRPSETLSLTCTVS | 6 |
| | | GGSIS | |
| | HFR2 | WIRQPPGKGLEWIG | 7 |
| | HFR3 | RVTISVDTSKNQFSLKLISVTAADT | 8 |
| | | AVYYCAR | |
| | HFR4 | WGRGTLVTVSS | 9 |
| | LC | SYVLTQPPSVSVAPGQTARITCGGN | 10 |
| | | NIGSKSVHWYQQKPGQAPVLVVYDD | |
| | | SDRPSGIPERFSGSNSGNTATLTIS | |
| | | RVEAGDEADYYCQVWDSSSEHYVFG | |
| | | TGTKVTVLGQPKANPTVTLFPPSSE | |
| | | ELQANKATLVCLISDFYPGAVTVAW | |
| | | KADGSPVKAGVETTKPSKQSNNKYA | |
| | | ASS | |
| | LC | SYVLTQPPSVSVAPGQTARITCGGN | 11 |
| | variable | NIGSKSVHWYQQKPGQAPVLVVYDD | |
| | | SDRPSGIPERFSGSNSGNTATLTIS | |
| | | RVEAGDEADYYCQVWDSSSEHYVFG | |
| | | TGTKVTVL | |
| | LCDR1 | GGNNIGSKSVH | 12 |
| | LCDR2 | DDSDRPS | 13 |
| | LCDR3 | QVWDSSSEHYV | 14 |
| | LFR1 | SYVLTQPPSVSVAPGQTARITC | 15 |
| | LFR2 | WYQQKPGQAPVLVVY | 16 |
| | LFR3 | GIPERFSGSNSGNTATLTISRVEAG | 17 |
| | | DEADYYC | |
| | LFR4 | FGTGTKVTVL | 18 |
| S20-22 | HC | QVQLQESGPGLVKPSETLSLTCTVS | 19 |
| | | GGSISSFYWGWIRQPAGKGLEWIGR | |
| | | FHTSGSTNYNPSFKSRVTMSVDTSK | |
| | | NQFSLKLTSVTAADTAVYYCASGRG | |
| | | SSWYVGWFFDLWGRGTLVTVSSAST | |
| | | KGPSVFPLAPSSKSTSGGTAALGCL | |
| | | VKDYFPEPVTVSWNSGALTSGVHTF | |
| | | PAVLQSSG | |
| | HC | QVQLQESGPGLVKPSETLSLTCTVS | 20 |
| | variable | GGSISSFYWGWIRQPAGKGLEWIGR | |
| | | FHTSGSTNYNPSFKSRVTMSVDTSK | |
| | | NQFSLKLTSVTAADTAVYYCASGRG | |
| | | SSWYVGWFFDLWGRGTLVTVSS | |
| | HCDR1 | SFYWG | 21 |
| | HCDR2 | RFHTSGSTNYNPSFKS | 22 |
| | HCDR3 | GRGSSWYVGWFFDL | 23 |
| | HFR1 | QVQLQESGPGLVKPSETLSLTCTVS | 24 |
| | | GGSIS | |
| | HFR2 | WIRQPAGKGLEWIG | 25 |
| | HFR3 | RVTMSVDTSKNQFSLKLTSVTAADT | 26 |
| | | AVYYCAS | |
| | HFR4 | WGRGTLVTVSS | 9 |
| | LC | DIVMTQSPDSLAVSLGERATINCKS | 27 |
| | | SQTVLYSSNNKNYLAWYQQKPGQPP | |
| | | KLLIYWASTRESGVPDRFSGSGSGT | |
| | | DFTLTISSLQAGDVAVYYCQQYYNT | |
| | | PDTFGGGTKVEINRTVAAPSVFIFP | |
| | | PSDEQLKSGTASVVCLLNNFYPREA | |
| | | KVQWKVDN | |
| | LC | DIVMTQSPDSLAVSLGERATINCKS | 28 |
| | variable | SQTVLYSSNNKNYLAWYQQKPGQPP | |
| | | KLLIYWASTRESGVPDRFSGSGSGT | |
| | | DFTLTISSLQAGDVAVYYCQQYYNT | |
| | | PDTFGGGTKVEI | |
| | LCDR1 | KSSQTVLYSSNNKNYLA | 29 |
| | LCDR2 | WASTRES | 30 |
| | LCDR3 | QQYYNTPDT | 31 |
| | LFR1 | DIVMTQSPDSLAVSLGERATINC | 32 |
| | LFR2 | WYQQKPGQPPKLLIY | 33 |
| | LFR3 | GVPDRFSGSGSGTDFTLTISSLQAG | 34 |
| | | DVAVYYC | |
| | LFR4 | FGGGTKVEI | 35 |
| S20-31 | HC | QVQLIQSGAEVKKPGASVKVSCTAS | 36 |
| | | GYSLNELPIQWVRQAPGKGLEWMGE | |
| | | FDPEDGETIYAEKFQGRVTLTEETS | |
| | | TNTAYMELSSLKSEDTAAYFCSTGS | |
| | | TIGVVIYAFAIWGQGTMVTVSSAST | |
| | | KGPSVFPLAPCSRSTSESTAALGCL | |
| | | VKDYFPEPVTVSWNSGALTSGVHTF | |
| | | PAVLQSSG | |
| | HC | QVQLIQSGAEVKKPGASVKVSCTAS | 37 |
| | variable | GYSLNELPIQWVRQAPGKGLEWMGE | |
| | | FDPEDGETIYAEKFQGRVTLTEETS | |
| | | TNTAYMELSSLKSEDTAAYFCSTGS | |
| | | TIGVVIYAFAIWGQGTMVTVSS | |
| | HCDR1 | ELPIQ | 38 |
| | HCDR2 | EFDPEDGETIYAEKFQG | 39 |
| | HCDR3 | GSTIGVVIYAFAI | 40 |
| | HFR1 | QVQLIQSGAEVKKPGASVKVSCTAS | 41 |
| | | GYSLN | |
| | HFR2 | WVRQAPGKGLEWMG | 42 |
| | HFR3 | RVTLTEETSTNTAYMELSSLKSEDT | 43 |
| | | AAYFCST | |
| | HFR4 | WGQGTMVTVSS | 44 |
| | LC | EIVLTQSPGTLSLSPGERATLSCRA | 45 |
| | | SQDITNNFLAWYQQKAGQAPKLFIY | |
| | | GASRRAPGIPHRFSGSGSGTDFTLT | |
| | | ISSLEPEDFAVYYCQQYGPSPTFGQ | |
| | | GTKVEIKRTVAAPSVFIFPPSDEQL | |
| | | KSGTASVVCLLNNFYPREAKVQWKV | |
| | | DNALQSGNSQESVTEQDSKDSTYSL | |
| | | SSTLTLSKADYE | |
| | LC | EIVLTQSPGTLSLSPGERATLSCRA | 46 |
| | variable | SQDITNNFLAWYQQKAGQAPKLFIY | |
| | | GASRRAPGIPHRFSGSGSGTDFTLT | |
| | | ISSLEPEDFAVYYCQQYGPSPTFGQ | |
| | | GTKVEIK | |
| | LCDR1 | RASQDITNNFLA | 47 |
| | LCDR2 | GASRRAP | 48 |
| | LCDR3 | QQYGPSPT | 49 |
| | LFR1 | EIVLTQSPGTLSLSPGERATLSC | 50 |
| | LFR2 | WYQQKAGQAPKLFIY | 51 |
| | LFR3 | GIPHRFSGSGSGTDFTLTISSLEPE | 52 |
| | | DFAVYYC | |
| | LFR4 | FGQGTKVEIK | 53 |
| S20-40 | HC | QVQLQESGPGLVKPSETLSLTCTVS | 54 |
| | | GGSISSYYWSWIRQPAGKGLEWIGR | |
| | | IYTSGSTNYNPSLKSRVTMSVDTSK | |
| | | NQFSLKLSSVTAADTAVYYCARGGS | |
| | | GWRFDYWGQGTLVTVSSGSASAPTL | |
| | | FPLVSCENSPSDTSSV | |
| | HC | QVQLQESGPGLVKPSETLSLTCTVS | 55 |
| | variable | GGSISSYYWSWIRQPAGKGLEWIGR | |
| | | IYTSGSTNYNPSLKSRVTMSVDTSK | |
| | | NQFSLKLSSVTAADTAVYYCARGGS | |
| | | GWRFDYWGQGTLVTVSS | |
| | HCDR1 | SYYWS | 56 |
| | HCDR2 | RIYTSGSTNYNPSLKS | 57 |
| | HCDR3 | GGSGWRFDY | 58 |
| | HFR1 | QVQLQESGPGLVKPSETLSLTCTVS | 24 |
| | | GGSIS | |
| | HFR2 | WIRQPAGKGLEWIG | 25 |
| | HFR3 | RVTMSVDTSKNQFSLKLSSVTAADT | 59 |
| | | AVYYCAR | |
| | HFR4 | WGQGTLVTVSS | 60 |
| | LC | QSALTQPASVSGSPGQSITISCTGT | 61 |
| | | SSDVGGYNYVSWYQQHPGKAPKLMI | |
| | | YDVSNRPSGVSNRFSGSKSGNTASL | |
| | | TISGLQAEDEADYYCSSYTSSSTLG | |
| | | VFGGGTKLTVLGQPKAAPSVTLFPP | |
| | | SSEELQANKATLVCLISDFYPGAVT | |
| | | VAWKADSSPVKAGVETTTPSKQSNN | |
| | | KYAASS | |
| | LC | QSALTQPASVSGSPGQSITISCTGT | 62 |
| | variable | SSDVGGYNYVSWYQQHPGKAPKLMI | |
| | | YDVSNRPSGVSNRFSGSKSGNTASL | |
| | | TISGLQAEDEADYYCSSYTSSSTLG | |
| | | VFGGGTKLTVL | |
| | LCDR1 | TGTSSDVGGYNYVS | 63 |
| | LCDR2 | DVSNRPS | 64 |
| | LCDR3 | SSYTSSSTLGV | 65 |
| | LFR1 | QSALTQPASVSGSPGQSITISC | 66 |
| | LFR2 | WYQQHPGKAPKLMIY | 67 |
| | LFR3 | GVSNRFSGSKSGNTASLTISGLQAE | 68 |
| | | DEADYYC | |
| | LFR4 | FGGGTKLTVL | 69 |
| S20-58 | HC | QVQLQESGPGLVKPSQTLSLTCTVS | 70 |
| | | GGSINSGDYYWSWIRQPPGKGLEWI | |
| | | GYIYFSGSTYYNPSLKSRVTISLDR | |
| | | SKNQFSLKLSSVTAADTAVYYCARE | |
| | | ESMITLGGVIVDWGQGTLVTVSSAS | |
| | | TKGPSVFPLAPSSKSTSGGTAALGC | |
| | | LVKDYFPEPVTVSWNSGALTSGVHT | |
| | | FPAVLQSSG | |
| | HC | QVQLQESGPGLVKPSQTLSLTCTVS | 71 |
| | variable | GGSINSGDYYWSWIRQPPGKGLEWI | |
| | | GYIYFSGSTYYNPSLKSRVTISLDR | |
| | | SKNQFSLKLSSVTAADTAVYYCARE | |
| | | ESMITLGGVIVDWGQGTLVTVSS | |
| | HCDR1 | SGDYYWS | 72 |
| | HCDR2 | YIYFSGSTYYNPSLKS | 73 |
| | HCDR3 | EESMITLGGVIVD | 74 |
| | HFR1 | QVQLQESGPGLVKPSQTLSLTCTVS | 75 |
| | | GGSIN | |
| | HFR2 | WIRQPPGKGLEWIG | 7 |
| | HFR3 | RVTISLDRSKNQFSLKLSSVTAADT | 76 |
| | | AVYYCAR | |
| | HFR4 | WGQGTLVTVSS | 60 |
| | LC | DIVMTQTPLSSPVTLGQPASISCRS | 77 |
| | | SQSLVHSDGDTYLSWLQQRPGQPPR | |
| | | LLIYKISNRFSGVPDRFSGSGAGTD | |
| | | FTLKISRVEAEDVGVYYCMQATQFP | |
| | | LTFGGGTKVEIKRTVAAPSVFIFPP | |
| | | SDEQLKSGTASVVCLLNNFYPREAK | |
| | | VQWKVDNALQSGNSQESVTEQDSKD | |
| | | STYSLSSTLTLSKADYE | |
| | LC | DIVMTQTPLSSPVTLGQPASISCRS | 78 |
| | variable | SQSLVHSDGDTYLSWLQQRPGQPPR | |
| | | LLIYKISNRFSGVPDRFSGSGAGTD | |
| | | FTLKISRVEAEDVGVYYCMQATQFP | |
| | | LTFGGGTKVEIK | |
| | LCDR1 | RSSQSLVHSDGDTYLS | 79 |
| | LCDR2 | KISNRFS | 80 |
| | LCDR3 | MQATQFPLT | 81 |
| | LFR1 | DIVMTQTPLSSPVTLGQPASISC | 82 |
| | LFR2 | WLQQRPGQPPRLLIY | 83 |
| | LFR3 | GVPDRFSGSGAGTDFTLKISRVEAE | 84 |
| | | DVGVYYC | |
| | LFR4 | FGGGTKVEIK | 85 |
| S20-74 | HC | QVQLQESGPGLVKPSETLSLTCTVS | 86 |
| | | GGSISSHYWSWIRQPPGKGLEQIGY | |
| | | MYYSGSTNYNPSLKSRVIISVDTSK | |
| | | NQFSLKLSSVTAADTAVYYCAGRDQ | |
| | | LLYGADGFDIWGQGTMVTVSSASTK | |
| | | GPSVFPLAPSSKSTSGGTAALGCLV | |
| | | KDYFPEPVTVSWNSGALTSGVHTFP | |
| | | AVLQSSG | |
| | HC | QVQLQESGPGLVKPSETLSLTCTVS | 87 |
| | variable | GGSISSHYWSWIRQPPGKGLEQIGY | |
| | | MYYSGSTNYNPSLKSRVIISVDTSK | |
| | | NQFSLKLSSVTAADTAVYYCAGRDQ | |
| | | LLYGADGFDIWGQGTMVTVSS | |
| | HCDR1 | SHYWS | 3 |
| | HCDR2 | YMYYSGSTNYNPSLKS | 88 |
| | HCDR3 | RDQLLYGADGFDI | 89 |
| | HFR1 | QVQLQESGPGLVKPSETLSLTCTVS | 24 |
| | | GGSIS | |
| | HFR2 | WIRQPPGKGLEQIG | 90 |
| | HFR3 | RVIISVDTSKNQFSLKLSSVTAADT | 91 |
| | | AVYYCAG | |
| | HFR4 | WGQGTMVTVSS | 44 |
| | LC | QSALTQPPSASGSPGQSVTISCTGT | 92 |
| | | SSDVGGYNYVSWYQQHPGKAPKLMI | |
| | | YEVSKRPSGVPDRYSGSKSGNTASL | |
| | | TVSGLQAEDEADYYCSSYAGSSNHV | |
| | | IFGGGTKLTVLGQPKAAPSVTLFPP | |
| | | SSEELQANKATLVCLISDFYPGAVT | |
| | | VAWKADSSPVKAGVETTTPSKQSNN | |
| | | KYAASS | |
| | LC | QSALTQPPSASGSPGQSVTISCTGT | 93 |
| | variable | SSDVGGYNYVSWYQQHPGKAPKLMI | |
| | | YEVSKRPSGVPDRYSGSKSGNTASL | |
| | | TVSGLQAEDEADYYCSSYAGSSNHV | |
| | | IFGGGTKLTVL | |
| | LCDR1 | TGTSSDVGGYNYVS | 63 |
| | LCDR2 | EVSKRPS | 94 |
| | LCDR3 | SSYAGSSNHVI | 95 |
| | LFR1 | QSALTQPPSASGSPGQSVTISC | 96 |
| | LFR2 | WYQQHPGKAPKLMIY | 67 |
| | LFR3 | GVPDRYSGSKSGNTASLTVSGLQAE | 97 |
| | | DEADYYC | |
| | LFR4 | FGGGTKLTVL | 69 |
| S20-86 | HC | [sequence omitted] | 98 |
| | | GFTFGDYAMYWVRQPPGKGLEWVSG | |
| | | ISWNRGTIGYADSVKGRFTISRDNA | |
| | | KNSLYLQMNSLTPEDTALYYCAKDM | |
| | | LPASRFFYYMDVWGKGTTVIVSSAS | |
| | | TKGPSVFPLAPSSKSTSGGTAALGC | |
| | | LVKDYFPEPVTVSWNSGALTSGVHT | |
| | | FPAVLQSSG | |
| | HC | [sequence omitted] | 99 |
| | variable | GFTFGDYAMYWVRQPPGKGLEWVSG | |
| | | ISWNRGTIGYADSVKGRFTISRDNA | |
| | | KNSLYLQMNSLTPEDTALYYCAKDM | |
| | | LPASRFFYYMDVWGKGTTVIVSS | |
| | HCDR1 | DYAMY | 100 |
| | HCDR2 | GISWNRGTIGYADSVKG | 101 |
| | HCDR3 | DMLPASRFFYYMDV | 102 |
| | HFR1 | [sequence omitted] | 103 |
| | | GFTFG | |
| | HFR2 | WVRQPPGKGLEWVS | 104 |
| | HFR3 | RFTISRDNAKNSLYLQMNSLTPEDT | 105 |
| | | ALYYCAK | |
| | HFR4 | WGKGTTVIVSS | 106 |
| | LC | QSALTQPASVSGSPGQSITISCTGT | 107 |
| | | SSDVGGYNYVSWYQQHPGKAPKLMI | |
| | | YDVSNRPSGVSNRFSGSKSGNTASL | |
| | | TISGLQAEDEADYYCSSYTSSSTLG | |
| | | VFGTGTKVTVLGQPKANPTVTLFPP | |
| | | SSEELQANKATLVCLISDFYPGAVT | |
| | | VAWKADGSPVKAGVETTKPSKQSNN | |
| | | KYAASS | |
| | LC | QSALTQPASVSGSPGQSITISCTGT | 108 |
| | variable | SSDVGGYNYVSWYQQHPGKAPKLMI | |
| | | YDVSNRPSGVSNRFSGSKSGNTASL | |
| | | TISGLQAEDEADYYCSSYTSSSTLG | |
| | | VFGTGTKVTVL | |
| | LCDR1 | TGTSSDVGGYNYVS | 63 |
| | LCDR2 | DVSNRPS | 64 |
| | LCDR3 | SSYTSSSTLGV | 65 |
| | LFR1 | QSALTQPASVSGSPGQSITISC | 66 |
| | LFR2 | WYQQHPGKAPKLMIY | 67 |
| | LFR3 | GVSNRFSGSKSGNTASLTISGLQAE | 68 |
| | | DEADYYC | |
| | LFR4 | FGTGTKVTVL | 18 |
| S24-68 | HC | QVQLQESGPGLVKPSETLSLTCTVS | 109 |
| | | GGSITSYYWSWIRQPPGKGLEWIEY | |
| | | IHYSGSTNYNPSLKSRVTISVDTSK | |
| | | NQFSLKLSSVTAADTAVYYCARLLK | |
| | | YSRGGCYFDHWGQGTLVTVSSASTK | |
| | | GPSVFPLAPSSKSTSGGTAALGCLV | |
| | | KDYFPEPVTVSWNSGALTSGVHTFP | |
| | | AVLQSSG | |
| | HC | QVQLQESGPGLVKPSETLSLTCTVS | 110 |
| | variable | GGSITSYYWSWIRQPPGKGLEWIEY | |
| | | IHYSGSTNYNPSLKSRVTISVDTSK | |
| | | NQFSLKLSSVTAADTAVYYCARLLK | |
| | | YSRGGCYFDHWGQGTLVTVSS | |
| | HCDR1 | SYYWS | 56 |
| | HCDR2 | YIHYSGSTNYNPSLKS | 111 |
| | HCDR3 | LLKYSRGGCYFDH | 112 |
| | HFR1 | QVQLQESGPGLVKPSETLSLTCTVS | 113 |
| | | GGSIT | |
| | HFR2 | WIRQPPGKGLEWIE | 114 |
| | HFR3 | RVTISVDTSKNQFSLKLSSVTAADT | 115 |
| | | AVYYCAR | |
| | HFR4 | WGQGTLVTVSS | 60 |
| | LC | QSVLTQPPSASGTPGQRVTISCSGS | 116 |
| | | SSNIGGNPVNWYQQLPGTAPKLLIY | |
| | | SNNQRPSGVPDRFSGSKSGTSASLA | |
| | | ISGLQSEDEADYYCAAWDDSLKGPV | |
| | | FGGGTKLTVLGQPKAAPSVTLFPPS | |
| | | SEELQANKATLVCLISDFYPGAVTV | |
| | | AWKADSSPVKAGVETTTPSKQSNNK | |
| | | YAASSYLSLTPEQWKSH | |
| | LC | QSVLTQPPSASGTPGQRVTISCSGS | 117 |
| | variable | SSNIGGNPVNWYQQLPGTAPKLLIY | |
| | | SNNQRPSGVPDRFSGSKSGTSASLA | |
| | | ISGLQSEDEADYYCAAWDDSLKGPV | |
| | | FGGGTKLTVL | |
| | LCDR1 | SGSSSNIGGNPVN | 118 |
| | LCDR2 | SNNQRPS | 119 |
| | LCDR3 | AAWDDSLKGPV | 120 |
| | LFR1 | QSVLTQPPSASGTPGQRVTISC | 121 |
| | LFR2 | WYQQLPGTAPKLLIY | 122 |
| | LFR3 | GVPDRFSGSKSGTSASLAISGLQSE | 123 |
| | | DEADYYC | |
| | LFR4 | FGGGTKLTVL | 69 |
| S24-105 | HC | [sequence omitted] | 124 |
| | | GFTLSSYSMNWVRQAPGKGLEWVSY | |
| | | ISSSSSTIYYADSVKGRFTISKDNA | |
| | | KNSLYLQMNSLRAEDTAVYYCAVGR | |
| | | GYFVYWGQGTLVTVSSASTKGPSVF | |
| | | PLAPSSKSTSGGTAALGCLVKDYFP | |
| | | EPVTVSWNSGALTSGVHTFPAVLQS | |
| | | SG | |
| | HC | [sequence omitted] | 125 |
| | variable | GFTLSSYSMNWVRQAPGKGLEWVSY | |
| | | ISSSSSTIYYADSVKGRFTISKDNA | |
| | | KNSLYLQMNSLRAEDTAVYYCAVGR | |
| | | GYFVYWGQGTLVTVSS | |
| | HCDR1 | SYSMN | 126 |
| | HCDR2 | YISSSSSTIYYADSVKG | 127 |
| | HCDR3 | GRGYFVY | 128 |
| | HFR1 | [sequence omitted] | 129 |
| | | GFTLS | |
| | HFR2 | WVRQAPGKGLEWVS | 130 |
| | HFR3 | RFTISKDNAKNSLYLQMNSLRAEDT | 131 |
| | | AVYYCAV | |
| | HFR4 | WGQGTLVTVSS | 60 |
| | LC | EIVLTQSPGTLSLSPGERATLSCRA | 132 |
| | | SQSVSSGYLAWYQQKPGQAPRLLIF | |
| | | GASSRATGIPDRFSGSGSGTDFTLT | |
| | | INRLEPEDFAVYYCQQYGSSRTFGQ | |
| | | GTKVEIKRTVAAPSVFIFPPSDEQL | |
| | | KSGTASVVCLLNNFYPREAKVQWKV | |
| | | DNALQSGNSQESVTEQDSKDSTYSL | |
| | | SSTLTLSKADYE | |
| | LC | EIVLTQSPGTLSLSPGERATLSCRA | 133 |
| | variable | SQSVSSGYLAWYQQKPGQAPRLLIF | |
| | | GASSRATGIPDRFSGSGSGTDFTLT | |
| | | INRLEPEDFAVYYCQQYGSSRTFGQ | |
| | | GTKVEIK | |
| | LCDR1 | RASQSVSSGYLA | 134 |
| | LCDR2 | GASSRAT | 135 |
| | LCDR3 | QQYGSSRT | 136 |
| | LFR1 | EIVLTQSPGTLSLSPGERATLSC | 50 |
| | LFR2 | WYQQKPGQAPRLLIF | 137 |
| | LFR3 | GIPDRFSGSGSGTDFTLTINRLEPE | 138 |
| | | DFAVYYC | |
| | LFR4 | FGQGTKVEIK | 53 |
| S24-178 | HC | QVQLVESGGGVVQPGRSLRLSCAAS | 139 |
| | | GFTFSSYGMHWVRQAPGKGLEWVAV | |
| | | IWYDGSNKYYADSVKGRFTISRDNS | |
| | | KNTLYLQMNSLRAEDTAVYYCARIE | |
| | | GYSYGDVRVYYYYGMDVWGQGTTVT | |
| | | VSSASTKGPSVFPLAPSSKSTSGGT | |
| | | AALGCLVKDYFPEPVTVSWNSGALT | |
| | | SGVHTFPAVLQSSG | |
| | HC | QVQLVESGGGVVQPGRSLRLSCAAS | 140 |
| | variable | GFTFSSYGMHWVRQAPGKGLEWVAV | |
| | | IWYDGSNKYYADSVKGRFTISRDNS | |
| | | KNTLYLQMNSLRAEDTAVYYCARIE | |
| | | GYSYGDVRVYYYYGMDVWGQGTTVT | |
| | | VSS | |
| | HCDR1 | SYGMH | 141 |
| | HCDR2 | VIWYDGSNKYYADSVKG | 142 |
| | HCDR3 | IEGYSYGDVRVYYYYGMDV | 143 |
| | HFR1 | QVQLVESGGGVVQPGRSLRLSCAAS | 144 |
| | | GFTFS | |
| | HFR2 | WVRQAPGKGLEWVA | 145 |
| | HFR3 | RFTISRDNSKNTLYLQMNSLRAEDT | 146 |
| | | AVYYCAR | |
| | HFR4 | WGQGTTVTVSS | 147 |
| | LC | QSALTQPASVSGSPGQSITISCTGT | 148 |
| | | TSDVGGYDYVSWYQQHPGKAPKLIL | |
| | | SEVSNRPSGVSNRFSGSKSGNTASL | |
| | | TISGLQAEDEADYYCSSYPSSSTLV | |
| | | FGTGTKVTVLGQPKANPTVTLFPPS | |
| | | SEELQANKATLVCLISDFYPGAVTV | |
| | | AWKADGSPVKAGVETTTPSKQSNNK | |
| | | YAASS | |
| | LC | QSALTQPASVSGSPGQSITISCTGT | 149 |
| | variable | TSDVGGYDYVSWYQQHPGKAPKLIL | |
| | | SEVSNRPSGVSNRFSGSKSGNTASL | |
| | | TISGLQAEDEADYYCSSYPSSSTLV | |
| | | FGTGTKVTVL | |
| | LCDR1 | TGTTSDVGGYDYVS | 150 |
| | LCDR2 | EVSNRPS | 151 |
| | LCDR3 | SSYPSSSTLV | 152 |
| | LFR1 | QSALTQPASVSGSPGQSITISC | 66 |
| | LFR2 | WYQQHPGKAPKLILS | 153 |
| | LFR3 | GVSNRFSGSKSGNTASLTISGLQAE | 68 |
| | | DEADYYC | |
| | LFR4 | FGTGTKVTVL | 18 |
| S24-188 | HC | QVHLVQSGAEVKKPGSSVKVSCKAS | 154 |
| | | GGTFSSCAISWVRQAPGQGLEWMGR | |
| | | IIPILGIANYAQKFQGRVTITADKS | |
| | | TSTAYMELSSLRSEDTAVYYCARGW | |
| | | EFGSGSYYRTDYYYYAMDVWGQGTT | |
| | | VTVSSASTKGPSVFPLAPCSRSTSG | |
| | | GTAALGCLVKDYFPEPVTVSWNSGA | |
| | | LTSGVHTFPAVLQSSG | |
| | HC | QVHLVQSGAEVKKPGSSVKVSCKAS | 155 |
| | variable | GGTFSSCAISWVRQAPGQGLEWMGR | |
| | | IIPILGIANYAQKFQGRVTITADKS | |
| | | TSTAYMELSSLRSEDTAVYYCARGW | |
| | | EFGSGSYYRTDYYYYAMDVWGQGTT | |
| | | VTVSS | |
| | HCDR1 | SCAIS | 156 |
| | HCDR2 | RIIPILGIANYAQKFQG | 157 |
| | HCDR3 | GWEFGSGSYYRTDYYYYAMDV | 158 |
| | HFR1 | QVHLVQSGAEVKKPGSSVKVSCKAS | 159 |
| | | GGTFS | |
| | HFR2 | WVRQAPGQGLEWMG | 160 |
| | HFR3 | RVTITADKSTSTAYMELSSLRSEDT | 161 |
| | | AVYYCAR | |
| | HFR4 | WGQGTTVTVSS | 147 |
| | LC | QSALTQPASVSGSPGQSITISCTGT | 162 |
| | | SSDVGGYNYVSWYQQHPGKAPKLMI | |
| | | YEVTNRPSGVSNRFSGSRSGNTASL | |
| | | TISGLQAEDEADYYCSSYTSSSLYV | |
| | | FGTGTKVAVLGQPKANPTVTLFPPS | |
| | | SEELQANKATLVCLISDFYPGAVTV | |
| | | AWKADSSPVKAGVETTKPSKQSNNK | |
| | | YAASS | |
| | LC | QSALTQPASVSGSPGQSITISCTGT | 163 |
| | variable | SSDVGGYNYVSWYQQHPGKAPKLMI | |
| | | YEVTNRPSGVSNRFSGSRSGNTASL | |
| | | TISGLQAEDEADYYCSSYTSSSLYV | |
| | | FGTGTKVAVL | |
| | LCDR1 | TGTSSDVGGYNYVS | 63 |
| | LCDR2 | EVTNRPS | 164 |
| | LCDR3 | SSYTSSSLYV | 165 |
| | LFR1 | QSALTQPASVSGSPGQSITISC | 66 |
| | LFR2 | WYQQHPGKAPKLMIY | 67 |
| | LFR3 | GVSNRFSGSRSGNTASLTISGLQAE | 166 |
| | | DEADYYC | |
| | LFR4 | FGTGTKVAVL | 167 |
| S24-202 | HC | EVQLVQSGAEVKKPGESLRISCKGS | 168 |
| | | GYSFSSYWISWVRQMPGKGLEWMGR | |
| | | IDPSDSNTNYSPSFQGHVTISADKS | |
| | | ISTAYLQWSSLKASDTAMYYCARLS | |
| | | VRVWFGELPHYGMDVWGQGTTVTVS | |
| | | SASTKGPSVFPLAPSSKSTSGGTAA | |
| | | LGCLVKDYFPEPVTVSWNSGALTSG | |
| | | VHTFPAVLQSSG | |
| | HC | EVQLVQSGAEVKKPGESLRISCKGS | 169 |
| | variable | GYSFSSYWISWVRQMPGKGLEWMGR | |
| | | IDPSDSNTNYSPSFQGHVTISADKS | |
| | | ISTAYLQWSSLKASDTAMYYCARLS | |
| | | VRVWFGELPHYGMDVWGQGTTVTVS | |
| | | S | |
| | HCDR1 | SYWIS | 170 |
| | HCDR2 | RIDPSDSNTNYSPSFQG | 171 |
| | HCDR3 | LSVRVWFGELPHYGMDV | 172 |
| | HFR1 | EVQLVQSGAEVKKPGESLRISCKGS | 173 |
| | | GYSFS | |
| | HFR2 | WVRQMPGKGLEWMG | 174 |
| | HFR3 | HVTISADKSISTAYLQWSSLKASDT | 175 |
| | | AMYYCAR | |
| | HFR4 | WGQGTTVTVSS | 147 |
| | LC | EIVLTQSPATLSLSPGERATLSCRA | 176 |
| | | SQSVSSYLAWYQQKPGQAPRLLIYD | |
| | | ASNRASGIPARFSGSGSGTDFTLTI | |
| | | SSLEPEDFAVYYCQQRRNWPLTFGG | |
| | | GTKVETKRTVAAPSVFIFPPSDEQL | |
| | | KSGTASVVCLLNNFYPREAKVQWKV | |
| | | DN | |
| | LC | EIVLTQSPATLSLSPGERATLSCRA | 177 |
| | variable | SQSVSSYLAWYQQKPGQAPRLLIYD | |
| | | ASNRASGIPARFSGSGSGTDFTLTI | |
| | | SSLEPEDFAVYYCQQRRNWPLTFGG | |
| | | GTKVETK | |
| | LCDR1 | RASQSVSSYLA | 178 |
| | LCDR2 | DASNRAS | 179 |
| | LCDR3 | QQRRNWPLT | 180 |
| | LFR1 | EIVLTQSPATLSLSPGERATLSC | 181 |
| | LFR2 | WYQQKPGQAPRLLIY | 182 |
| | LFR3 | GIPARFSGSGSGTDFTLTISSLEPE | 183 |
| | | DFAVYYC | |
| | LFR4 | FGGGTKVETK | 184 |
| S24-278 | HC | [sequence omitted] | 185 |
| | | GYTFTGYYMHWVRQAPGQGLEWMGW | |
| | | INPNSGDTNYAQKFQGWVTMTRDTS | |
| | | LSTAYMELSRLKSDDTAVYYCARVG | |
| | | VGEYSGRHYYYYGMDVWGQGTTVTV | |
| | | SSASTKGPSVFPLAPSSKSTSGGTA | |
| | | ALGCLVKDYFPEPVTVSWNSGALTS | |
| | | GVHTFPAVLQSSG | |
| | HC | [sequence omitted] | 186 |
| | variable | GYTFTGYYMHWVRQAPGQGLEWMGW | |
| | | INPNSGDTNYAQKFQGWVTMTRDTS | |
| | | LSTAYMELSRLKSDDTAVYYCARVG | |
| | | VGEYSGRHYYYYGMDVWGQGTTVTV | |
| | | SS | |
| | HCDR1 | GYYMH | 187 |
| | HCDR2 | WINPNSGDTNYAQKFQG | 188 |
| | HCDR3 | VGVGEYSGRHYYYYGMDV | 189 |
| | HFR1 | [sequence omitted] | 190 |
| | | GYTFT | |
| | HFR2 | WVRQAPGQGLEWMG | 160 |
| | HFR3 | WVTMTRDTSLSTAYMELSRLKSDDT | 191 |
| | | AVYYCAR | |
| | HFR4 | WGQGTTVTVSS | 147 |
| | LC | EIVLTQSPGTLSLSPGERATLSCRA | 192 |
| | | SQSISSSYLAWYQQKPGQAPRLLIY | |
| | | GASSRATGIPDRFSGSGSGTDFTLT | |
| | | ISRLEPEDFAVYYCQQYGSSLTFGG | |
| | | GTKVEIKRTVAAPSVFIFPPSDEQL | |
| | | KSGTASVVCLLNNFYPREAKVQWKV | |
| | | DN | |
| | LC | EIVLTQSPGTLSLSPGERATLSCRA | 193 |
| | variable | SQSISSSYLAWYQQKPGQAPRLLIY | |
| | | GASSRATGIPDRFSGSGSGTDFTLT | |
| | | ISRLEPEDFAVYYCQQYGSSLTFGG | |
| | | GTKVEIK | |
| | LCDR1 | RASQSISSSYLA | 194 |
| | LCDR2 | GASSRAT | 135 |
| | LCDR3 | QQYGSSLT | 195 |
| | LFR1 | EIVLTQSPGTLSLSPGERATLSC | 50 |
| | LFR2 | WYQQKPGQAPRLLIY | 182 |
| | LFR3 | GIPDRFSGSGSGTDFTLTISRLEPE | 196 |
| | | DFAVYYC | |
| | LFR4 | FGGGTKVEIK | 85 |
| S24-339 | HC | EVQLVESGGGLVQPGRSLRLSCTAS | 197 |
| | | GFTFGDYAMSWFRQAPGKGLEWVGF | |
| | | IRSKAYGGTTQHAASVKGRFTISRD | |
| | | DSKSIAYLQMNSLKTEDTAVYHCAR | |
| | | DGYDCSGGRCYSHIFDYWGQGTLVT | |
| | | VSSGESSPPPLVHLGRLSLPGSQGQ | |
| | | SLV | |
| | HC | EVQLVESGGGLVQPGRSLRLSCTAS | 198 |
| | variable | GFTFGDYAMSWFRQAPGKGLEWVGF | |
| | | IRSKAYGGTTQHAASVKGRFTISRD | |
| | | DSKSIAYLQMNSLKTEDTAVYHCAR | |
| | | DGYDCSGGRCYSHIFDYWGQGTLVT | |
| | | VSS | |
| | HCDR1 | DYAMS | 199 |
| | HCDR2 | FIRSKAYGGTTQHAASVKG | 200 |
| | HCDR3 | DGYDCSGGRCYSHIFDY | 201 |
| | HFR1 | EVQLVESGGGLVQPGRSLRLSCTAS | 202 |
| | | GFTFG | |
| | HFR2 | WFRQAPGKGLEWVG | 203 |
| | HFR3 | RFTISRDDSKSIAYLQMNSLKTEDT | 204 |
| | | AVYHCAR | |
| | HFR4 | WGQGTLVTVSS | 60 |
| | LC | EIVMTQSPATLSVSPGERATLSCRA | 205 |
| | | SQSVSSNLAWYQQKPGQAPRLLIYG | |
| | | ASTRATGIPARFSGSGSGTEFTLTI | |
| | | SSLQSEDFAVYYCQQYDNWWTFGQG | |
| | | TKVEIKRTVAAPSVFIFPPSDEQLK | |
| | | SGTASVVCLLNNFYPREAKVQWKVD | |
| | | N | |
| | LC | EIVMTQSPATLSVSPGERATLSCRA | 206 |
| | variable | SQSVSSNLAWYQQKPGQAPRLLIYG | |
| | | ASTRATGIPARFSGSGSGTEFTLTI | |
| | | SSLQSEDFAVYYCQQYDNWWTFGQG | |
| | | TKVEIK | |
| | LCDR1 | RASQSVSSNLA | 207 |
| | LCDR2 | GASTRAT | 208 |
| | LCDR3 | QQYDNWWT | 209 |
| | LFR1 | EIVMTQSPATLSVSPGERATLSC | 210 |
| | LFR2 | WYQQKPGQAPRLLIY | 182 |
| | LFR3 | GIPARFSGSGSGTEFTLTISSLQSE | 211 |
| | | DFAVYYC | |
| | LFR4 | FGQGTKVEIK | 53 |
| S24-472 | HC | QVQLQESGPGLVKPSGTLSLTCAVS | 212 |
| | | GGSISSINWWSWVRQPPGKGLEWIG | |
| | | EIYHSGNTNYNPSLKSRVTISGDKS | |
| | | KNQFSLKLSSVTAADTAVYYCARGY | |
| | | YDSSPYYEPQGIDYWGQGILVTVSS | |
| | | ASTKGPSVFPLAPSSKSTSGGTAAL | |
| | | GCLVKDYFPEPVTVSWNSGALTSGV | |
| | | HTFPAVLQSSG | |
| | HC | QVQLQESGPGLVKPSGTLSLTCAVS | 213 |
| | variable | GGSISSINWWSWVRQPPGKGLEWIG | |
| | | EIYHSGNTNYNPSLKSRVTISGDKS | |
| | | KNQFSLKLSSVTAADTAVYYCARGY | |
| | | YDSSPYYEPQGIDYWGQGILVTVSS | |
| | HCDR1 | SINWWS | 214 |
| | HCDR2 | EIYHSGNTNYNPSLKS | 215 |
| | HCDR3 | GYYDSSPYYEPQGIDY | 216 |
| | HFR1 | QVQLQESGPGLVKPSGTLSLTCAVS | 217 |
| | | GGSIS | |
| | HFR2 | WVRQPPGKGLEWIG | 218 |
| | HFR3 | RVTISGDKSKNQFSLKLSSVTAADT | 219 |
| | | AVYYCAR | |
| | HFR4 | WGQGILVTVSS | 220 |
| | LC | QLVLTQSPSASASLGASVKLTCTLS | 221 |
| | | SGHSSYTIAWHQQQPEKGPRYLMKV | |
| | | NSDGSHTKGDGIPDRFSGSSSGAER | |
| | | YLTISSLQSEDEADYYCQTWGTGIR | |
| | | VFGGGTKLTVLGQPKAAPSVTLFPP | |
| | | SSEELQANKATLVCLISDFYPGAVT | |
| | | VAWKADSSPVKAGVETTTPSKQSNN | |
| | | KYAASS | |
| | LC | QLVLTQSPSASASLGASVKLTCTLS | 222 |
| | variable | SGHSSYTIAWHQQQPEKGPRYLMKV | |
| | | NSDGSHTKGDGIPDRFSGSSSGAER | |
| | | YLTISSLQSEDEADYYCQTWGTGIR | |
| | | VFGGGTKLTVL | |
| | LCDR1 | TLSSGHSSYTIA | 223 |
| | LCDR2 | VNSDGSHTKGD | 224 |
| | LCDR3 | QTWGTGIRV | 225 |
| | LFR1 | QLVLTQSPSASASLGASVKLTC | 226 |
| | LFR2 | WHQQQPEKGPRYLMK | 227 |
| | LFR3 | GIPDRFSGSSSGAERYLTISSLQSE | 228 |
| | | DEADYYC | |
| | LFR4 | FGGGTKLTVL | 69 |
| S24-490 | HC | [sequence omitted] | 229 |
| | | GYTFTSYFIHWVRQAPGQGLEWMGI | |
| | | INPSGGSTSYAQKFQGRVTMTRDTS | |
| | | TSTVYMELSSLRSEDTAVYYCARHT | |
| | | TPTRYFDYWGQGTLVTVSSGSASAP | |
| | | TLFPLVSCENSPSDTSSV | |
| | HC | [sequence omitted] | 230 |
| | variable | GYTFTSYFIHWVRQAPGQGLEWMGI | |
| | | INPSGGSTSYAQKFQGRVTMTRDTS | |
| | | TSTVYMELSSLRSEDTAVYYCARHT | |
| | | TPTRYFDYWGQGTLVTVSS | |
| | HCDR1 | SYFIH | 231 |
| | HCDR2 | IINPSGGSTSYAQKFQG | 232 |
| | HCDR3 | HTTPTRYFDY | 233 |
| | HFR1 | [sequence omitted] | 190 |
| | | GYTFT | |
| | HFR2 | WVRQAPGQGLEWMG | 160 |
| | HFR3 | RVTMTRDTSTSTVYMELSSLRSEDT | 234 |
| | | AVYYCAR | |
| | HFR4 | WGQGTLVTVSS | 60 |
| | LC | EIVLTQSPGTLSLSPGERATLSCRA | 235 |
| | | SQSVTSSYLAWYQQRRGQAPRLLIY | |
| | | GASSRATGIPDRFSGSGSGTDFTLT | |
| | | ISRLEPEDFAVYYCQQYGSSPLTFG | |
| | | GGTKVEIKRTVAAPSVFIFPPSDEQ | |
| | | LKSGTASVVCLLNNFYPREAKVQWK | |
| | | VDN | |
| | LC | EIVLTQSPGTLSLSPGERATLSCRA | 236 |
| | variable | SQSVTSSYLAWYQQRRGQAPRLLIY | |
| | | GASSRATGIPDRFSGSGSGTDFTLT | |
| | | ISRLEPEDFAVYYCQQYGSSPLTFG | |
| | | GGTKVEIK | |
| | LCDR1 | RASQSVTSSYLA | 237 |
| | LCDR2 | GASSRAT | 135 |
| | LCDR3 | QQYGSSPLT | 238 |
| | LFR1 | EIVLTQSPGTLSLSPGERATLSC | 50 |
| | LFR2 | WYQQRRGQAPRLLIY | 239 |
| | LFR3 | GIPDRFSGSGSGTDFTLTISRLEPE | 196 |
| | | DFAVYYC | |
| | LFR4 | FGGGTKVEIK | 85 |
| S24-494 | HC | QLQLQESGPGLVKPSETLSLTCTVS | 240 |
| | | GGSISSSSYYWGWIRQPPGKGLEWI | |
| | | GSIYYSGSTYYNPSLKSRVTISVDT | |
| | | SKNQFSLKLSSVTAADTAVYYCARK | |
| | | PRSDYGYFDLWGRGTLVTVSSASTK | |
| | | GPSV | |
| | HC | QLQLQESGPGLVKPSETLSLTCTVS | 241 |
| | variable | GGSISSSSYYWGWIRQPPGKGLEWI | |
| | | GSIYYSGSTYYNPSLKSRVTISVDT | |
| | | SKNQFSLKLSSVTAADTAVYYCARK | |
| | | PRSDYGYFDLWGRGTLVTVSS | |
| | HCDR1 | SSSYYWG | 242 |
| | HCDR2 | SIYYSGSTYYNPSLKS | 243 |
| | HCDR3 | KPRSDYGYFDL | 244 |
| | HFR1 | QLQLQESGPGLVKPSETLSLTCTVS | 245 |
| | | GGSIS | |
| | HFR2 | WIRQPPGKGLEWIG | 7 |
| | HFR3 | RVTISVDTSKNQFSLKLSSVTAADT | 115 |
| | | AVYYCAR | |
| | HFR4 | WGRGTLVTVSS | 9 |
| | LC | DIQMTQSPSSLSASVGDRVTITCRA | 246 |
| | | SQSISSYLNWYQQKPGKAPKLLIYA | |
| | | ASSLQSGVPSRFSGSGSGTDFTLTI | |
| | | SSLQPEDFATYYCQQSYSTPQLTFG | |
| | | GGTKVEIKRTVAAPSVFIFPPSDEQ | |
| | | LKSGTASVVCLLNNFYPREAKVQWK | |
| | | VDN | |
| | LC | DIQMTQSPSSLSASVGDRVTITCRA | 247 |
| | variable | SQSISSYLNWYQQKPGKAPKLLIYA | |
| | | ASSLQSGVPSRFSGSGSGTDFTLTI | |
| | | SSLQPEDFATYYCQQSYSTPQLTFG | |
| | | GGTKVEIK | |
| | LCDR1 | RASQSISSYLN | 248 |
| | LCDR2 | AASSLQS | 249 |
| | LCDR3 | QQSYSTPQLT | 250 |
| | LFR1 | DIQMTQSPSSLSASVGDRVTITC | 251 |
| | LFR2 | WYQQKPGKAPKLLIY | 252 |
| | LFR3 | GVPSRFSGSGSGTDFTLTISSLQPE | 253 |
| | | DFATYYC | |
| | LFR4 | FGGGTKVEIK | 85 |
| S24-566 | HC | EVQLVESGGGLVKPGRSLRLSCTAS | 254 |
| | | GFTFGDYAMSWFRQAPGKGLEWVGF | |
| | | TRRKAYGGTTEYAASVKGRFTISRD | |
| | | DSKSIAYLQMNSLKTEDTAVYYCTR | |
| | | IKVGRFDLTDSGSYRYFDYWGQGTL | |
| | | VTVSSASTKGPSVFPLAPSSKSTSG | |
| | | GTAALGCLVKDYFPEPVTVSWNSGA | |
| | | LTSGVHTFPAVLQSSG | |
| | HC | EVQLVESGGGLVKPGRSLRLSCTAS | 255 |
| | variable | GFTFGDYAMSWFRQAPGKGLEWVGF | |
| | | TRRKAYGGTTEYAASVKGRFTISRD | |
| | | DSKSIAYLQMNSLKTEDTAVYYCTR | |
| | | IKVGRFDLTDSGSYRYFDYWGQGTL | |
| | | VTVSS | |
| | HCDR1 | DYAMS | 199 |
| | HCDR2 | FTRRKAYGGTTEYAASVKG | 256 |
| | HCDR3 | IKVGRFDLTDSGSYRYFDY | 257 |
| | HFR1 | EVQLVESGGGLVKPGRSLRLSCTAS | 258 |
| | | GFTFG | |
| | HFR2 | WFRQAPGKGLEWVG | 203 |
| | HFR3 | RFTISRDDSKSIAYLQMNSLKTEDT | 259 |
| | | AVYYCTR | |
| | HFR4 | WGQGTLVTVSS | 60 |
| | LC | DIVMTQSPLSLPVTPGEPASISCRS | 260 |
| | | SQSLLHSNGYNYLDWYLQKPGQSPQ | |
| | | LLIYLGSNRASGVPDRFSGSGSGTD | |
| | | FTLKISRVEAEDVGVYYCMQPLQTP | |
| | | WTFGQGTKVEIKRTVAAPSVFIFPP | |
| | | SDEQLKSGTASVVCLLNNFYPREAK | |
| | | VQWKVDN | |
| | LC | DIVMTQSPLSLPVTPGEPASISCRS | 261 |
| | variable | SQSLLHSNGYNYLDWYLQKPGQSPQ | |
| | | LLIYLGSNRASGVPDRFSGSGSGTD | |
| | | FTLKISRVEAEDVGVYYCMQPLQTP | |
| | | WTFGQGTKVEIK | |
| | LCDR1 | RSSQSLLHSNGYNYLD | 262 |
| | LCDR2 | LGSNRAS | 263 |
| | LCDR3 | MQPLQTPWT | 264 |
| | LFR1 | DIVMTQSPLSLPVTPGEPASISC | 265 |
| | LFR2 | WYLQKPGQSPQLLIY | 266 |
| | LFR3 | GVPDRFSGSGSGTDFTLKISRVEAE | 267 |
| | | DVGVYYC | |
| | LFR4 | FGQGTKVEIK | 53 |
| S24-636 | HC | [sequence omitted] | 268 |
| | | GFTLSSYWMSWVRQAPGKGLEWVAN | |
| | | IKQDGSEKYYVDSVKGRFTISRDNA | |
| | | KNSLYLQMNSLRAEDTAVYYCARDL | |
| | | TATWFDPWGQGTLVTVSSAPTKAPD | |
| | | VFPIISGCRHPKDNSPVVLACLITG | |
| | | YH | |
| | HC | [sequence omitted] | 269 |
| | variable | GFTLSSYWMSWVRQAPGKGLEWVAN | |
| | | IKQDGSEKYYVDSVKGRFTISRDNA | |
| | | KNSLYLQMNSLRAEDTAVYYCARDL | |
| | | TATWFDPWGQGTLVTVSS | |
| | HCDR1 | SYWMS | 270 |
| | HCDR2 | NIKQDGSEKYYVDSVKG | 271 |
| | HCDR3 | DLTATWFDP | 272 |
| | HFR1 | [sequence omitted] | 129 |
| | | GFTLS | |
| | HFR2 | WVRQAPGKGLEWVA | 145 |
| | HFR3 | RFTISRDNAKNSLYLQMNSLRAEDT | 273 |
| | | AVYYCAR | |
| | HFR4 | WGQGTLVTVSS | 60 |
| | LC | QTVVTQEPSFSVSPGGTVTLTCGLS | 274 |
| | | SGSVSTSYYPSWYQQTPGQAPRTLI | |
| | | YSTNKRSSGVPDRFSGSILGNKAAL | |
| | | TITGAQADDESDYYCVLYMGSGMSV | |
| | | FGGGTKLTVLGQPKAAPSVTLFPPS | |
| | | SEELQANKATLVCLISDFYPGAVTV | |
| | | AWKADSSPVKAGVETTTPSKQSNNK | |
| | | YAASS | |
| | LC | QTVVTQEPSFSVSPGGTVTLTCGLS | 275 |
| | variable | SGSVSTSYYPSWYQQTPGQAPRTLI | |
| | | YSTNKRSSGVPDRFSGSILGNKAAL | |
| | | TITGAQADDESDYYCVLYMGSGMSV | |
| | | FGGGTKLTVL | |
| | LCDR1 | GLSSGSVSTSYYPS | 276 |
| | LCDR2 | STNKRSS | 277 |
| | LCDR3 | VLYMGSGMSV | 278 |
| | LFR1 | QTVVTQEPSFSVSPGGTVTLTC | 279 |
| | LFR2 | WYQQTPGQAPRTLIY | 280 |
| | LFR3 | GVPDRFSGSILGNKAALTITGAQAD | 281 |
| | | DESDYYC | |
| | LFR4 | FGGGTKLTVL | 69 |
| S24-740 | HC | [sequence omitted] | 282 |
| | | GYTFTSYALHWVRQAPGQRLEWMGW | |
| | | INAGNGNTKYSQRFQGRVTIIRDTS | |
| | | ASTTYMELSSLRSEDTAVYYCARGY | |
| | | ARAGVITIKESLHHWGQGTLVTVSS | |
| | | ASTKGPSVFPLAPSSKSTSGGTAAL | |
| | | GCLVKDYFPEPVTVSWNSGALTSGV | |
| | | HTFPAVLQSSG | |
| | HC | [sequence omitted] | 283 |
| | variable | GYTFTSYALHWVRQAPGQRLEWMGW | |
| | | INAGNGNTKYSQRFQGRVTIIRDTS | |
| | | ASTTYMELSSLRSEDTAVYYCARGY | |
| | | ARAGVITIKESLHHWGQGTLVTVSS | |
| | HCDR1 | SYALH | 284 |
| | HCDR2 | WINAGNGNTKYSQRFQG | 285 |
| | HCDR3 | GYARAGVITIKESLHH | 286 |
| | HFR1 | [sequence omitted] | 190 |
| | | GYTFT | |
| | HFR2 | WVRQAPGQRLEWMG | 287 |
| | HFR3 | RVTIIRDTSASTTYMELSSLRSEDT | 288 |
| | | AVYYCAR | |
| | HFR4 | WGQGTLVTVSS | 60 |
| | LC | DIVMTQSPDSLAVSLGERATINCKS | 289 |
| | | SQSVLYSSNNKNYLAWYQQKPGQPP | |
| | | KLLIYWASTRESGVPDRFSGSGSGT | |
| | | DFTLTISSLQAEDVAVYYCQQYYST | |
| | | PPLTFGGGTKVEIKRTVAAPSVFIF | |
| | | PPSDEQLKSGTASVVCLLNNFYPRE | |
| | | AKVQWKVDN | |
| | LC | DIVMTQSPDSLAVSLGERATINCKS | 290 |
| | variable | SQSVLYSSNNKNYLAWYQQKPGQPP | |
| | | KLLIYWASTRESGVPDRFSGSGSGT | |
| | | DFTLTISSLQAEDVAVYYCQQYYST | |
| | | PPLTFGGGTKVEIK | |
| | LCDR1 | KSSQSVLYSSNNKNYLA | 291 |
| | LCDR2 | WASTRES | 30 |
| | LCDR3 | QQYYSTPPLT | 292 |
| | LFR1 | DIVMTQSPDSLAVSLGERATINC | 32 |
| | LFR2 | WYQQKPGQPPKLLIY | 33 |
| | LFR3 | GVPDRFSGSGSGTDFTLTISSLQAE | 293 |
| | | DVAVYYC | |
| | LFR4 | FGGGTKVEIK | 85 |
| S24-791 | HC | QVQLQESGPGLVKPSETLSLTCTVS | 294 |
| | | GGSISSSYWSWIRQPPGKGLEWIGY | |
| | | IYYSGNTNYNPSLKSRVTLSIDTSK | |
| | | NQFSLKLSSVTAADTAVYYCACSVT | |
| | | IFGVVTPAFDIWGQGTMVTVSSAST | |
| | | KGPSVFPLAPSSKSTSGGTAALGCL | |
| | | VKDYFPEPVTVSWNSGALTSGVHTF | |
| | | PAVLQSSG | |
| | HC | QVQLQESGPGLVKPSETLSLTCTVS | 295 |
| | variable | GGSISSSYWSWIRQPPGKGLEWIGY | |
| | | IYYSGNTNYNPSLKSRVTLSIDTSK | |
| | | NQFSLKLSSVTAADTAVYYCACSVT | |
| | | IFGVVTPAFDIWGQGTMVTVSS | |
| | HCDR1 | SSYWS | 296 |
| | HCDR2 | YIYYSGNTNYNPSLKS | 297 |
| | HCDR3 | SVTIFGVVTPAFDI | 298 |
| | HFR1 | QVQLQESGPGLVKPSETLSLTCTVS | 24 |
| | | GGSIS | |
| | HFR2 | WIRQPPGKGLEWIG | 7 |
| | HFR3 | RVTLSIDTSKNQFSLKLSSVTAADT | 299 |
| | | AVYYCAC | |
| | HFR4 | WGQGTMVTVSS | 44 |
| | LC | EIVLTHSPGTLSLSPGERATLSCRA | 300 |
| | | SQSVRSYLAWYQQKPGQAPRLLIYG | |
| | | ASSRATGIPDRFSGSGSGTDFTLTI | |
| | | SRLEPDDFAVYYCQQYGSSPWTFGQ | |
| | | GTKVEIKRTVAAPSVFIFPPSDEQL | |
| | | KSGTASVVCLLNNFYPREAKVQWKV | |
| | | DNALQSGNSQESVTEQDSKDSTYSL | |
| | | SSTLTLSKADYE | |
| | LC | EIVLTHSPGTLSLSPGERATLSCRA | 301 |
| | variable | SQSVRSYLAWYQQKPGQAPRLLIYG | |
| | | ASSRATGIPDRFSGSGSGTDFTLTI | |
| | | SRLEPDDFAVYYCQQYGSSPWTFGQ | |
| | | GTKVEIK | |
| | LCDR1 | RASQSVRSYLA | 302 |
| | LCDR2 | GASSRAT | 135 |
| | LCDR3 | QQYGSSPWT | 303 |
| | LFR1 | EIVLTHSPGTLSLSPGERATLSC | 304 |
| | LFR2 | WYQQKPGQAPRLLIY | 182 |
| | LFR3 | GIPDRFSGSGSGTDFTLTISRLEPD | 305 |
| | | DFAVYYC | |
| | LFR4 | FGQGTKVEIK | 53 |
| S24-902 | HC | [sequence omitted] | 306 |
| | | GGTFSSYAISWVRQAPGQGLEWMGR | |
| | | IIPILGIANYAQKFQGRVTITADKS | |
| | | TSTAYMELSSLRSEDTAVYYCARWD | |
| | | FGVVIQYGMDVWGQGTTVTVSSAST | |
| | | KGPSVFPLAPSSKSTSGGTAALGCL | |
| | | VKDYFPEPVTVSWNSGALTSGVHTF | |
| | | PAVLQSSGLYSLSSVVTVPSSSL | |
| | HC | [sequence omitted] | 307 |
| | variable | GGTFSSYAISWVRQAPGQGLEWMGR | |
| | | IIPILGIANYAQKFQGRVTITADKS | |
| | | TSTAYMELSSLRSEDTAVYYCARWD | |
| | | FGVVIQYGMDVWGQGTTVTVSS | |
| | HCDR1 | SYAIS | 308 |
| | HCDR2 | RIIPILGIANYAQKFQG | 157 |
| | HCDR3 | WDFGVVIQYGMDV | 309 |
| | HFR1 | [sequence omitted] | 310 |
| | | GGTFS | |
| | HFR2 | WVRQAPGQGLEWMG | 160 |
| | HFR3 | RVTITADKSTSTAYMELSSLRSEDT | 161 |
| | | AVYYCAR | |
| | HFR4 | WGQGTTVTVSS | 147 |
| | LC | QAVVTQEPSLTVSPGGTVTLTCGSS | 311 |
| | | TGAVTSGHYPYWFQQKPGQAPRTLI | |
| | | YDTSNKHSWTPARFSGSLLGGKAAL | |
| | | TLSGAQPEDEAEYYCLLSYSGWVFG | |
| | | GGTKLTVLGQPKAAPSVTLFPPSSE | |
| | | ELQANKATLVCLISDFYPGAVTVAW | |
| | | KADSSPVKAGVETTTPSKQSNNKYA | |
| | | ASS | |
| | LC | QAVVTQEPSLTVSPGGTVTLTCGSS | 312 |
| | variable | TGAVTSGHYPYWFQQKPGQAPRTLI | |
| | | YDTSNKHSWTPARFSGSLLGGKAAL | |
| | | TLSGAQPEDEAEYYCLLSYSGWVFG | |
| | | GGTKLTVL | |
| | LCDR1 | GSSTGAVTSGHYPY | 313 |
| | LCDR2 | DTSNKHS | 314 |
| | LCDR3 | LLSYSGWV | 315 |
| | LFR1 | QAVVTQEPSLTVSPGGTVTLTC | 316 |
| | LFR2 | WFQQKPGQAPRTLIY | 317 |
| | LFR3 | WTPARFSGSLLGGKAALTLSGAQPE | 318 |
| | | DEAEYYC | |
| | LFR4 | FGGGTKLTVL | 69 |
| S24-921 | HC | QVQLQESGPGLVKPSETLSLTCTVS | 319 |
| | | GGSINSFYWNWIRQPPGKGLEWIGY | |
| | | IYYSGNTKYNPSLKSRVTISVDTSN | |
| | | SQFSLKLSSVTAADTAVYYCAALKK | |
| | | QELVSLQAFDIWGQGTMVTVSSAST | |
| | | KGPSVFPLAPSSKSTSGGTAALGCL | |
| | | VKDYFPEPVTVSWNSGALTSGVHTF | |
| | | PAVLQSSG | |
| | HC | QVQLQESGPGLVKPSETLSLTCTVS | 320 |
| | variable | GGSINSFYWNWIRQPPGKGLEWIGY | |
| | | IYYSGNTKYNPSLKSRVTISVDTSN | |
| | | SQFSLKLSSVTAADTAVYYCAALKK | |
| | | QELVSLQAFDIWGQGTMVTVSS | |
| | HCDR1 | SFYWN | 321 |
| | HCDR2 | YIYYSGNTKYNPSLKS | 322 |
| | HCDR3 | LKKQELVSLQAFDI | 323 |
| | HFR1 | QVQLQESGPGLVKPSETLSLTCTVS | 324 |
| | | GGSIN | |
| | HFR2 | WIRQPPGKGLEWIG | 7 |
| | HFR3 | RVTISVDTSNSQFSLKLSSVTAADT | 325 |
| | | AVYYCAA | |
| | HFR4 | WGQGTMVTVSS | 44 |
| | LC | DIQMTQSPSSLSASLGDGVTITCRA | 326 |
| | | SQSISSYLSWYQQKPGKAPKLLIYA | |
| | | ASSLQSGVPSRFSGSGSGTDFTLTI | |
| | | SSLQPEDFATYYCQQSYNTPVTFGQ | |
| | | GTKVEIKRTVAAPSVFIFPPSDEQL | |
| | | KSGTASVVCLLNNFYPREAKVQWKV | |
| | | DNADRKS | |
| | LC | DIQMTQSPSSLSASLGDGVTITCRA | 327 |
| | variable | SQSISSYLSWYQQKPGKAPKLLIYA | |
| | | ASSLQSGVPSRFSGSGSGTDFTLTI | |
| | | SSLQPEDFATYYCQQSYNTPVTFGQ | |
| | | GTKVEIK | |
| | LCDR1 | RASQSISSYLS | 328 |
| | LCDR2 | AASSLQS | 249 |
| | LCDR3 | QQSYNTPVT | 329 |
| | LFR1 | DIQMTQSPSSLSASLGDGVTITC | 330 |
| | LFR2 | WYQQKPGKAPKLLIY | 252 |
| | LFR3 | GVPSRFSGSGSGTDFTLTISSLQPE | 253 |
| | | DFATYYC | |
| | LFR4 | FGQGTKVEIK | 53 |
| S24-1063 | HC | QVQLQESGPGLVKPSETLSLTCTVS | 331 |
| | | GGSISSYYWSWIRQPPGKGLEWIGY | |
| | | IYYSGSTKYNPSLKSRVTISVDTSK | |
| | | NQFSLKLTSVTAADTAVYYCARIYD | |
| | | SSGYYHPVFDYWGQGTLVTVSSAST | |
| | | KGPSVFPLAPSSKSTSGGTAALGCL | |
| | | VKDYFPEPVTVSWNSGALTSGVHTF | |
| | | PAVLQSSG | |
| | HC | QVQLQESGPGLVKPSETLSLTCTVS | 332 |
| | variable | GGSISSYYWSWIRQPPGKGLEWIGY | |
| | | IYYSGSTKYNPSLKSRVTISVDTSK | |
| | | NQFSLKLTSVTAADTAVYYCARIYD | |
| | | SSGYYHPVFDYWGQGTLVTVSS | |
| | HCDR1 | SYYWS | 56 |
| | HCDR2 | YIYYSGSTKYNPSLKS | 333 |
| | HCDR3 | IYDSSGYYHPVFDY | 334 |
| | HFR1 | QVQLQESGPGLVKPSETLSLTCTVS | 24 |
| | | GGSIS | |
| | HFR2 | WIRQPPGKGLEWIG | 7 |
| | HFR3 | RVTISVDTSKNQFSLKLTSVTAADT | 335 |
| | | AVYYCAR | |
| | HFR4 | WGQGTLVTVSS | 60 |
| | LC | EIVLTQSPGTLSLSPGERATLSCRA | 336 |
| | | SQSVSSSYLAWYQQKPGQAPRLLIY | |
| | | GASSRATDIPDRFSGSGSGTDFTLT | |
| | | ISRLEPEDFAVYYCQQYGSSPWTFG | |
| | | QGTKVEIKRTVAAPSVFIFPPSDEQ | |
| | | LKSGTASVVCLLNNFYPREAKVQWK | |
| | | VDN | |
| | LC | EIVLTQSPGTLSLSPGERATLSCRA | 337 |
| | variable | SQSVSSSYLAWYQQKPGQAPRLLIY | |
| | | GASSRATDIPDRFSGSGSGTDFTLT | |
| | | ISRLEPEDFAVYYCQQYGSSPWTFG | |
| | | QGTKVEIK | |
| | LCDR1 | RASQSVSSSYLA | 338 |
| | LCDR2 | GASSRAT | 135 |
| | LCDR3 | QQYGSSPWT | 303 |
| | LFR1 | EIVLTQSPGTLSLSPGERATLSC | 50 |
| | LFR2 | WYQQKPGQAPRLLIY | 182 |
| | LFR3 | DIPDRFSGSGSGTDFTLTISRLEPE | 339 |
| | | DFAVYYC | |
| | LFR4 | FGQGTKVEIK | 53 |
| S24-1224 | HC | QVQLVQSGAEVKKPGASVRVSCKAS | 340 |
| | | GYTFTSYYIYWVRQAPGQGLEWMGV | |
| | | INPSGGSTSYAQKFQGRVTLTRDTS | |
| | | TSTVYMDLSSLRSEDTAVYYCARDP | |
| | | IMWEVVTRGRGNWFDPWGQGTLVTV | |
| | | SSASTKGPSVFPLAPSSKSTSGGTA | |
| | | ALGCLVKDYFPEPVTVSWNSGALTS | |
| | | GVHTFPAVLQSSG | |
| | HC | QVQLVQSGAEVKKPGASVRVSCKAS | 341 |
| | variable | GYTFTSYYIYWVRQAPGQGLEWMGV | |
| | | INPSGGSTSYAQKFQGRVTLTRDTS | |
| | | TSTVYMDLSSLRSEDTAVYYCARDP | |
| | | IMWEVVTRGRGNWFDPWGQGTLVTV | |
| | | SS | |
| | HCDR1 | SYYIY | 342 |
| | HCDR2 | VINPSGGSTSYAQKFQG | 343 |
| | HCDR3 | DPIMWEVVTRGRGNWFDP | 344 |
| | HFR1 | QVQLVQSGAEVKKPGASVRVSCKAS | 345 |
| | | GYTFT | |
| | HFR2 | WVRQAPGQGLEWMG | 160 |
| | HFR3 | RVTLTRDTSTSTVYMDLSSLRSEDT | 346 |
| | | AVYYCAR | |
| | HFR4 | WGQGTLVTVSS | 60 |
| | LC | QSVLTQPPSVSGAPGQRVTIPCTGS | 347 |
| | | SFNIGAGYDVHWYQQLPGTAPKLLI | |
| | | FGNSNRPSGVPDRFSGSRSGTSASL | |
| | | AITGLQAEDEADYYCQSYDSSLSGV | |
| | | VFGGGTTLTVLGQPKAAPSVTLFPP | |
| | | SSEELQANKATLVCLISDFYPGAVT | |
| | | VAWKADSSPVKAGVETTTPSKQSNN | |
| | | KYAASSYLSLTPEQWKSH | |
| | LC | QSVLTQPPSVSGAPGQRVTIPCTGS | 348 |
| | variable | SFNIGAGYDVHWYQQLPGTAPKLLI | |
| | | FGNSNRPSGVPDRFSGSRSGTSASL | |
| | | AITGLQAEDEADYYCQSYDSSLSGV | |
| | | VFGGGTTLTVL | |
| | LCDR1 | TGSSFNIGAGYDVH | 349 |
| | LCDR2 | GNSNRPS | 350 |
| | LCDR3 | QSYDSSLSGVV | 351 |
| | LFR1 | QSVLTQPPSVSGAPGQRVTIPC | 352 |
| | LFR2 | WYQQLPGTAPKLLIF | 353 |
| | LFR3 | GVPDRFSGSRSGTSASLAITGLQAE | 354 |
| | | DEADYYC | |
| | LFR4 | FGGGTTLTVL | 355 |
| S24-1271 | HC | [sequence omitted] | 356 |
| | | GFTVSSNYMSWVRQAPGKGLEWVSV | |
| | | IYSDGNTYYADSVKGRFTISRDNSK | |
| | | NMLYLQMNSLRAEDTAVYYCARDPG | |
| | | QGYCSGGSCAPSYSLDYWGQGTLVT | |
| | | VSSGSASAPTLFPLVSCENSPSDTS | |
| | | SV | |
| | HC | [sequence omitted] | 357 |
| | variable | GFTVSSNYMSWVRQAPGKGLEWVSV | |
| | | IYSDGNTYYADSVKGRFTISRDNSK | |
| | | NMLYLQMNSLRAEDTAVYYCARDPG | |
| | | QGYCSGGSCAPSYSLDYWGQGTLVT | |
| | | VSS | |
| | HCDR1 | SNYMS | 358 |
| | HCDR2 | VIYSDGNTYYADSVKG | 359 |
| | HCDR3 | DPGQGYCSGGSCAPSYSLDY | 360 |
| | HFR1 | [sequence omitted] | 361 |
| | | GFTVS | |
| | HFR2 | WVRQAPGKGLEWVS | 130 |
| | HFR3 | RFTISRDNSKNMLYLQMNSLRAEDT | 362 |
| | | AVYYCAR | |
| | HFR4 | WGQGTLVTVSS | 60 |
| | LC | SYELTQPPSVSVSPGQTASITCSGD | 363 |
| | | KLGDRYVCWYQQKPGQSPVLVIYQD | |
| | | TKRPSGIPERFSGSNSGNTATLTIS | |
| | | GTQAMDEADYYCQAWDSSTWVFGGG | |
| | | TKLTVLGQPKAAPSVTLFPPSSEEL | |
| | | QANKATLVCLISDFYPGAVTVAWKA | |
| | | DSSPVKAGVETTTPSKQSNNKYAAS | |
| | | S | |
| | LC | SYELTQPPSVSVSPGQTASITCSGD | 364 |
| | variable | KLGDRYVCWYQQKPGQSPVLVIYQD | |
| | | TKRPSGIPERFSGSNSGNTATLTIS | |
| | | GTQAMDEADYYCQAWDSSTWVFGGG | |
| | | TKLTVL | |
| | LCDR1 | SGDKLGDRYVC | 365 |
| | LCDR2 | QDTKRPS | 366 |
| | LCDR3 | QAWDSSTWV | 367 |
| | LFR1 | SYELTQPPSVSVSPGQTASITC | 368 |
| | LFR2 | WYQQKPGQSPVLVIY | 369 |
| | LFR3 | GIPERFSGSNSGNTATLTISGTQAM | 370 |
| | | DEADYYC | |
| | LFR4 | FGGGTKLTVL | 69 |
| S24-1339 | HC | [sequence omitted] | 371 |
| | | GFTVSSNYMSWVRQAPGKGLEWVSD | |
| | | IYSGGSTYYADSVKGRFTISRHNSK | |
| | | NTLYLQMNSLRAEDTAVYYCARDRR | |
| | | GYSYGLHHGMDVWGQGTTVTVSSAS | |
| | | TKGPSVFPLAPSSKSTSGGTAALGC | |
| | | LVKDYFPEPVTVSWNSGALTSGVHT | |
| | | FPAVLQSSG | |
| | HC | [sequence omitted] | 372 |
| | variable | GFTVSSNYMSWVRQAPGKGLEWVSD | |
| | | IYSGGSTYYADSVKGRFTISRHNSK | |
| | | NTLYLQMNSLRAEDTAVYYCARDRR | |
| | | GYSYGLHHGMDVWGQGTTVTVSS | |
| | HCDR1 | SNYMS | 358 |
| | HCDR2 | DIYSGGSTYYADSVKG | 373 |
| | HCDR3 | DRRGYSYGLHHGMDV | 374 |
| | HFR1 | [sequence omitted] | 361 |
| | | GFTVS | |
| | HFR2 | WVRQAPGKGLEWVS | 130 |
| | HFR3 | RFTISRHNSKNTLYLQMNSLRAEDT | 375 |
| | | AVYYCAR | |
| | HFR4 | WGQGTTVTVSS | 147 |
| | LC | EIVLTQSPGTLSLSPGERATLSCRA | 376 |
| | | SQSVSSSYLAWYQQKPDQAPRLLIY | |
| | | GASSRATGIPDRFSGSGSGTDFTLT | |
| | | ISRLEPEDFAVYYCQQYGSSPNTFG | |
| | | QGTKLEIKRTVAAPSVFIFPPSDEQ | |
| | | LKSGTASVVCLLNNFYPREAKVQWK | |
| | | VDN | |
| | LC | EIVLTQSPGTLSLSPGERATLSCRA | 377 |
| | variable | SQSVSSSYLAWYQQKPDQAPRLLIY | |
| | | GASSRATGIPDRFSGSGSGTDFTLT | |
| | | ISRLEPEDFAVYYCQQYGSSPNTFG | |
| | | QGTKLEIK | |
| | LCDR1 | RASQSVSSSYLA | 338 |
| | LCDR2 | GASSRAT | 135 |
| | LCDR3 | QQYGSSPNT | 378 |
| | LFR1 | EIVLTQSPGTLSLSPGERATLSC | 50 |
| | LFR2 | WYQQKPDQAPRLLIY | 379 |
| | LFR3 | GIPDRFSGSGSGTDFTLTISRLEPE | 196 |
| | | DFAVYYC | |
| | LFR4 | FGQGTKLEIK | 380 |
| S24-1345 | HC | QLQLQESGPGLVKPSETLSLTCTVS | 381 |
| | | GGSISSSSYYWGWIRQPPGKGLEWI | |
| | | GSIYYSGSTYYNPSLKSRVTISVDT | |
| | | SKNQFSLKLSSVTAADTAVYYCARR | |
| | | IRRPTSEVVITYVFDYWGQGTLVTV | |
| | | SSAPTKAPDVFPIISGCRHPKDNSP | |
| | | VVLACLITGYH | |
| | HC | QLQLQESGPGLVKPSETLSLTCTVS | 382 |
| | variable | GGSISSSSYYWGWIRQPPGKGLEWI | |
| | | GSIYYSGSTYYNPSLKSRVTISVDT | |
| | | SKNQFSLKLSSVTAADTAVYYCARR | |
| | | IRRPTSEVVITYVFDYWGQGTLVTV | |
| | | SS | |
| | HCDR1 | SSSYYWG | 242 |
| | HCDR2 | SIYYSGSTYYNPSLKS | 243 |
| | HCDR3 | RIRRPTSEVVITYVFDY | 383 |
| | HFR1 | QLQLQESGPGLVKPSETLSLTCTVS | 245 |
| | | GGSIS | |
| | HFR2 | WIRQPPGKGLEWIG | 7 |
| | HFR3 | RVTISVDTSKNQFSLKLSSVTAADT | 115 |
| | | AVYYCAR | |
| | HFR4 | WGQGTLVTVSS | 60 |
| | LC | AIQLTQSPSSLSASVGDRVTITCRA | 384 |
| | | SQGISSALAWYQQKPGKAPKLLIYD | |
| | | ASSLESGVPSRFSGSGSGTDFTLTI | |
| | | SSLQPEDFATYYCQQFNSYLTFGGG | |
| | | TKVEIKRTVAAPSVFIFPPSDEQLK | |
| | | SGTASVVCLLNNFYPREAKVQWKVD | |
| | | NALQSGNSQESVTEQDSKDSTYSLS | |
| | LC | AIQLTQSPSSLSASVGDRVTITCRA | 385 |
| | variable | SQGISSALAWYQQKPGKAPKLLIYD | |
| | | ASSLESGVPSRFSGSGSGTDFTLTI | |
| | | SSLQPEDFATYYCQQFNSYLTFGGG | |
| | | TKVEIK | |
| | LCDR1 | RASQGISSALA | 386 |
| | LCDR2 | DASSLES | 387 |
| | LCDR3 | QQFNSYLT | 388 |
| | LFR1 | AIQLTQSPSSLSASVGDRVTITC | 389 |
| | LFR2 | WYQQKPGKAPKLLIY | 252 |
| | LFR3 | GVPSRFSGSGSGTDFTLTISSLQPE | 253 |
| | | DFATYYC | |
| | LFR4 | FGGGTKVEIK | 85 |
| S24-1378 | HC | [sequence omitted] | 390 |
| | | GFTVSSNYMSWVRQAPGKGLEWVSV | |
| | | IYSGGSTYYADSVKGRFTISRHNSK | |
| | | NTLYLQMNSLRAEDTAVYYCAREGY | |
| | | CTNGVCYRHAFDIWGQGTMVTVSSG | |
| | | SASAPTLFPLVSCENSPSDTSSV | |
| | HC | [sequence omitted] | 391 |
| | variable | GFTVSSNYMSWVRQAPGKGLEWVSV | |
| | | IYSGGSTYYADSVKGRFTISRHNSK | |
| | | NTLYLQMNSLRAEDTAVYYCAREGY | |
| | | CTNGVCYRHAFDIWGQGTMVTVSS | |
| | HCDR1 | SNYMS | 358 |
| | HCDR2 | VIYSGGSTYYADSVKG | 392 |
| | HCDR3 | EGYCTNGVCYRHAFDI | 393 |
| | HFR1 | [sequence omitted] | 361 |
| | | GFTVS | |
| | HFR2 | WVRQAPGKGLEWVS | 130 |
| | HFR3 | RFTISRHNSKNTLYLQMNSLRAEDT | 375 |
| | | AVYYCAR | |
| | HFR4 | WGQGTMVTVSS | 44 |
| | LC | QTVVTQEPSFSVSPGGTVTLTCGLS | 394 |
| | | SGSVSTSYYPSWYQQTPGQAPRTLI | |
| | | YSTNTRSSGVPDRFSGSILGNKAAL | |
| | | TITGAQADDESDYYCVLYMGSGISV | |
| | | FGGGTKLTVLGQPKAAPSVTLFPPS | |
| | | SEELQANKATLVCLISDFYPGAVTV | |
| | | AWKADSSPVKAGVETTTPSKQSNNK | |
| | | YAASS | |
| | LC | QTVVTQEPSFSVSPGGTVTLTCGLS | 395 |
| | variable | SGSVSTSYYPSWYQQTPGQAPRTLI | |
| | | YSTNTRSSGVPDRFSGSILGNKAAL | |
| | | TITGAQADDESDYYCVLYMGSGISV | |
| | | FGGGTKLTVL | |
| | LCDR1 | GLSSGSVSTSYYPS | 276 |
| | LCDR2 | STNTRSS | 396 |
| | LCDR3 | VLYMGSGISV | 397 |
| | LFR1 | QTVVTQEPSFSVSPGGTVTLTC | 279 |
| | LFR2 | WYQQTPGQAPRTLIY | 280 |
| | LFR3 | GVPDRFSGSILGNKAALTITGAQAD | 281 |
| | | DESDYYC | |
| | LFR4 | FGGGTKLTVL | 69 |
| S24-1379 | HC | QVQLQESGPGLVKPSETLSLTCTVS | 398 |
| | | GGSISSYYWSWIRQPPGKGLEWIGY | |
| | | IYYSGSTNYNPSLKSRVTISVDTSK | |
| | | NQFSLKLSSVTAADTAVYYCARDYY | |
| | | QLPMDVWGQGTTVTVSSASTKGPSV | |
| | | FPLAPSSKSTSGGTAALGCLVKDYF | |
| | | PEPVTVSWNSGALTSGVHTFPAVLQ | |
| | | SSG | |
| | HC | QVQLQESGPGLVKPSETLSLTCTVS | 399 |
| | variable | GGSISSYYWSWIRQPPGKGLEWIGY | |
| | | IYYSGSTNYNPSLKSRVTISVDTSK | |
| | | NQFSLKLSSVTAADTAVYYCARDYY | |
| | | QLPMDVWGQGTTVTVSS | |
| | HCDR1 | SYYWS | 56 |
| | HCDR2 | YIYYSGSTNYNPSLKS | 4 |
| | HCDR3 | DYYQLPMDV | 400 |
| | HFR1 | QVQLQESGPGLVKPSETLSLTCTVS | 24 |
| | | GGSIS | |
| | HFR2 | WIRQPPGKGLEWIG | 7 |
| | HFR3 | RVTISVDTSKNQFSLKLSSVTAADT | 115 |
| | | AVYYCAR | |
| | HFR4 | WGQGTTVTVSS | 147 |
| | LC | QSVLTQPPSASGTPGQRVTISCSGS | 401 |
| | | SSNIGSNYVYWYQQLPGTAPKLLIY | |
| | | RNNQRPSGVPDRFSGSKSGTSASLA | |
| | | ISGLRSEDEADYYCAAWDDSLSGRV | |
| | | FGGGT | |
| | | KLTVLGQPKAAPSVTLFPPSSEELQ | |
| | | ANKATLVCLISDFYPGAVTVAWKAD | |
| | | SSPVKAGVETTTPSKQSNNKYAASS | |
| | LC | QSVLTQPPSASGTPGQRVTISCSGS | 402 |
| | variable | SSNIGSNYVYWYQQLPGTAPKLLIY | |
| | | RNNQRPSGVPDRFSGSKSGTSASLA | |
| | | ISGLRSEDEADYYCAAWDDSLSGRV | |
| | | FGGGTKLTVL | |
| | LCDR1 | SGSSSNIGSNYVY | 403 |
| | LCDR2 | RNNQRPS | 404 |
| | LCDR3 | AAWDDSLSGRV | 405 |
| | LFR1 | QSVLTQPPSASGTPGQRVTISC | 121 |
| | LFR2 | WYQQLPGTAPKLLIY | 122 |
| | LFR3 | GVPDRFSGSKSGTSASLAISGLRSE | 406 |
| | | DEADYYC | |
| | LFR4 | FGGGTKLTVL | 69 |
| S24-1384 | HC | [sequence omitted] | 407 |
| | | GFTFSSYSMNWVRQAPGKGLEWVSY | |
| | | ISSSSSIIYYADSVKGRFTISRDNA | |
| | | KNSLYLQMNSLRAEDTAVYYCARDF | |
| | | LDYSRSYSYGMDVWGQGTTVTVSSA | |
| | | STKGPSVFPLAPSSKSTSGGTAALG | |
| | | CLVKDYFPEPVTVSWNSGALTSGVH | |
| | | TFPAVLQSSG | |
| | HC | [sequence omitted] | 408 |
| | variable | GFTFSSYSMNWVRQAPGKGLEWVSY | |
| | | ISSSSSIIYYADSVKGRFTISRDNA | |
| | | KNSLYLQMNSLRAEDTAVYYCARDF | |
| | | LDYSRSYSYGMDVWGQGTTVTVSS | |
| | HCDR1 | SYSMN | 126 |
| | HCDR2 | YISSSSSIIYYADSVKG | 409 |
| | HCDR3 | DFLDYSRSYSYGMDV | 410 |
| | HFR1 | [sequence omitted] | 411 |
| | | GFTFS | |
| | HFR2 | WVRQAPGKGLEWVS | 130 |
| | HFR3 | RFTISRDNAKNSLYLQMNSLRAEDT | 273 |
| | | AVYYCAR | |
| | HFR4 | WGQGTTVTVSS | 147 |
| | LC | SYVLTQPPSVSVAPGQTARITCGGD | 412 |
| | | NIGSKNVHWYQQKPGQAPVLVVFDD | |
| | | SDRPSGIPERFSGSNSGNTATLTIS | |
| | | RVEAGDEADYYCQVWDSSSDHYVVF | |
| | | GGGTKLTVLGQPKAAPSVTLFPPSS | |
| | | EELQANKATLVCLISDFYPGAVTVA | |
| | | WKADSSPVKAGVETTTPSKQSNNKY | |
| | | AASSY | |
| | LC | SYVLTQPPSVSVAPGQTARITCGGD | 413 |
| | variable | NIGSKNVHWYQQKPGQAPVLVVFDD | |
| | | SDRPSGIPERFSGSNSGNTATLTIS | |
| | | RVEAGDEADYYCQVWDSSSDHYVVF | |
| | | GGGTKLTVL | |
| | LCDR1 | GGDNIGSKNVH | 414 |
| | LCDR2 | DDSDRPS | 13 |
| | LCDR3 | QVWDSSSDHYVV | 415 |
| | LFR1 | SYVLTQPPSVSVAPGQTARITC | 15 |
| | LFR2 | WYQQKPGQAPVLVVF | 416 |
| | LFR3 | GIPERFSGSNSGNTATLTISRVEAG | 17 |
| | | DEADYYC | |
| | LFR4 | FGGGTKLTVL | 69 |
| S24-1476 | HC | EVQLVESGGGLVQPGRSLRLSCTAS | 417 |
| | | GFTFGDYAMSWFRQAPGKGLEWVGF | |
| | | IRSKAYGGTTQYAASVKGRFTISRD | |
| | | DSKSIAYLQMNSLKTEDTAVYYCTR | |
| | | VRYCTNGVCYGYHFDYWGQGTVVTV | |
| | | SSAST | |
| | HC | EVQLVESGGGLVQPGRSLRLSCTAS | 418 |
| | variable | GFTFGDYAMSWFRQAPGKGLEWVGF | |
| | | IRSKAYGGTTQYAASVKGRFTISRD | |
| | | DSKSIAYLQMNSLKTEDTAVYYCTR | |
| | | VRYCTNGVCYGYHFDYWGQGTVVTV | |
| | | SS | |
| | HCDR1 | DYAMS | 199 |
| | HCDR2 | FIRSKAYGGTTQYAASVKG | 419 |
| | HCDR3 | VRYCTNGVCYGYHFDY | 420 |
| | HFR1 | EVQLVESGGGLVQPGRSLRLSCTAS | 202 |
| | | GFTFG | |
| | HFR2 | WFRQAPGKGLEWVG | 203 |
| | HFR3 | RFTISRDDSKSIAYLQMNSLKTEDT | 259 |
| | | AVYYCTR | |
| | HFR4 | WGQGTVVTVSS | 421 |
| | LC | EIVMTQSPATLSVSPGERATLSCRA | 422 |
| | | SQSVSSNLAWYQQKPGQAPRLLIYG | |
| | | ASTRATGIPARFSGSGSGTEFTLTI | |
| | | SSLQSEDFAVYYCQQYNNWWTFGQG | |
| | | TKVEIKRTVAAPSVFIFPPSDEQLK | |
| | | SGTASVVCLLNNFYPREAKVQWKVD | |
| | | N | |
| | LC | EIVMTQSPATLSVSPGERATLSCRA | 423 |
| | variable | SQSVSSNLAWYQQKPGQAPRLLIYG | |
| | | ASTRATGIPARFSGSGSGTEFTLTI | |
| | | SSLQSEDFAVYYCQQYNNWWTFGQG | |
| | | TKVEIK | |
| | LCDR1 | RASQSVSSNLA | 207 |
| | LCDR2 | GASTRAT | 208 |
| | LCDR3 | QQYNNWWT | 424 |
| | LFR1 | EIVMTQSPATLSVSPGERATLSC | 210 |
| | LFR2 | WYQQKPGQAPRLLIY | 182 |
| | LFR3 | GIPARFSGSGSGTEFTLTISSLQSE | 211 |
| | | DFAVYYC | |
| | LFR4 | FGQGTKVEIK | 53 |
| S24-1564 | HC | QVQLQESGPGLVKPSETLSLTCTVS | 425 |
| | | GGSISSYYWSWIRQPPGKGLEWIGY | |
| | | VYYSGNTKYNPSLKSRVTISVDTSK | |
| | | NQFSLKLGSVTAADTAVYYCARHSR | |
| | | IEVAGTLDFDYWGQGTLVTVSSAST | |
| | | KGPSVFPLAPSSKSTSGGTAALGCL | |
| | | VKDYFPEPVTVSWNSGALTSGVHTF | |
| | | PAVLQSSG | |
| | HC | QVQLQESGPGLVKPSETLSLTCTVS | 426 |
| | variable | GGSISSYYWSWIRQPPGKGLEWIGY | |
| | | VYYSGNTKYNPSLKSRVTISVDTSK | |
| | | NQFSLKLGSVTAADTAVYYCARHSR | |
| | | IEVAGTLDFDYWGQGTLVTVSS | |
| | HCDR1 | SYYWS | 56 |
| | HCDR2 | YVYYSGNTKYNPSLKS | 427 |
| | HCDR3 | HSRIEVAGTLDFDY | 428 |
| | HFR1 | QVQLQESGPGLVKPSETLSLTCTVS | 24 |
| | | GGSIS | |
| | HFR2 | WIRQPPGKGLEWIG | 7 |
| | HFR3 | RVTISVDTSKNQFSLKLGSVTAADT | 429 |
| | | AVYYCAR | |
| | HFR4 | WGQGTLVTVSS | 60 |
| | LC | DIQMTQSPSSLSASVGDRVTITCRA | 430 |
| | | SQSIRSYLNWYQQKRGKAPKLLIYA | |
| | | ASSLQSGVPSRFSGSGSGTDFTLTI | |
| | | SSLQPEDFATYYCQQSYSTPPTFGQ | |
| | | GTKVEIKRTVAAPSVFIFPPSDEQL | |
| | | KSGTASVVCLLNNFYPREAKVQWKV | |
| | | DN | |
| | LC | DIQMTQSPSSLSASVGDRVTITCRA | 431 |
| | variable | SQSIRSYLNWYQQKRGKAPKLLIYA | |
| | | ASSLQSGVPSRFSGSGSGTDFTLTI | |
| | | SSLQPEDFATYYCQQSYSTPPTFGQ | |
| | | GTKVEIK | |
| | LCDR1 | RASQSIRSYLN | 432 |
| | LCDR2 | AASSLQS | 249 |
| | LCDR3 | QQSYSTPPT | 433 |
| | LFR1 | DIQMTQSPSSLSASVGDRVTITC | 251 |
| | LFR2 | WYQQKRGKAPKLLIY | 434 |
| | LFR3 | GVPSRFSGSGSGTDFTLTISSLQPE | 253 |
| | | DFATYYC | |
| | LFR4 | FGQGTKVEIK | 53 |
| S24-1636 | HC | QVQLVESGGGVVQPGRSLRLSCAAS | 435 |
| | | GFTFSNYGMHWVRQAPGKGLEWVAV | |
| | | IWYDGSNKYYADSVKGRFTISRDNS | |
| | | KNTLYLQMNSLRAEDTAVYYCARGD | |
| | | CTNGVCHPLLIYYDSSGLDYWGQGT | |
| | | LVTVSSASTKGPSVFPLAPSSKSTS | |
| | | GGTAALGCLVKDYFPEPVTVSWNSG | |
| | | ALTSGVHTFPAVLQSSG | |
| | HC | QVQLVESGGGVVQPGRSLRLSCAAS | 436 |
| | variable | GFTFSNYGMHWVRQAPGKGLEWVAV | |
| | | IWYDGSNKYYADSVKGRFTISRDNS | |
| | | KNTLYLQMNSLRAEDTAVYYCARGD | |
| | | CTNGVCHPLLIYYDSSGLDYWGQGT | |
| | | LVTVSS | |
| | HCDR1 | NYGMH | 437 |
| | HCDR2 | VIWYDGSNKYYADSVKG | 142 |
| | HCDR3 | GDCTNGVCHPLLIYYDSSGLDY | 438 |
| | HFR1 | QVQLVESGGGVVQPGRSLRLSCAAS | 144 |
| | | GFTFS | |
| | HFR2 | WVRQAPGKGLEWVA | 145 |
| | HFR3 | RFTISRDNSKNTLYLQMNSLRAEDT | 146 |
| | | AVYYCAR | |
| | HFR4 | WGQGTLVTVSS | 60 |
| | LC | EIVLTQSPATLSLSPGERATLSCRA | 439 |
| | | SQSVSSYLAWYQQKPGQAPRLLIYD | |
| | | ASNRATGIPARFSGSGSGTDFTLTI | |
| | | SSLEPEDFAVYYCQQRSNWPPITFG | |
| | | PGTKVDIKRTVAAPSVFIFPPSDEQ | |
| | | LKSGTASVVCLLNNFYPREAKVQWK | |
| | | VDNALQSGNSQESVTEQDSKDSTYS | |
| | | L | |
| | LC | EIVLTQSPATLSLSPGERATLSCRA | 440 |
| | variable | SQSVSSYLAWYQQKPGQAPRLLIYD | |
| | | ASNRATGIPARFSGSGSGTDFTLTI | |
| | | SSLEPEDFAVYYCQQRSNWPPITFG | |
| | | PGTKVDIK | |
| | LCDR1 | RASQSVSSYLA | 178 |
| | LCDR2 | DASNRAT | 441 |
| | LCDR3 | QQRSNWPPIT | 442 |
| | LFR1 | EIVLTQSPATLSLSPGERATLSC | 181 |
| | LFR2 | WYQQKPGQAPRLLIY | 182 |
| | LFR3 | GIPARFSGSGSGTDFTLTISSLEPE | 183 |
| | | DFAVYYC | |
| | LFR4 | FGPGTKVDIK | 443 |
| S24-1002 | HC | QVQLVESGGGVVQPGRSLRLSCAAS | 444 |
| | | GFTFTSYAMHWVRQAPGKGLEWVAV | |
| | | ISYDGGSKYYADSVKGRFTISRDNS | |
| | | KNTLYLQMNSLRAEDTAVYYCARTT | |
| | | PGITAAGTGTLGRYYYYGMDVWGQG | |
| | | TTVTVSSGSASAPTLFPLVSCENSP | |
| | | SDTSSV | |
| | HC | QVQLVESGGGVVQPGRSLRLSCAAS | 445 |
| | variable | GFTFTSYAMHWVRQAPGKGLEWVAV | |
| | | ISYDGGSKYYADSVKGRFTISRDNS | |
| | | KNTLYLQMNSLRAEDTAVYYCARTT | |
| | | PGITAAGTGTLGRYYYYGMDVWGQG | |
| | | TTVTVSS | |
| | HCDR1 | SYAMH | 446 |
| | HCDR2 | VISYDGGSKYYADSVKG | 447 |
| | HCDR3 | TTPGITAAGTGTLGRYYYYGMDV | 448 |
| | HFR1 | QVQLVESGGGVVQPGRSLRLSCAAS | 449 |
| | | GFTFT | |
| | HFR2 | WVRQAPGKGLEWVA | 145 |
| | HFR3 | RFTISRDNSKNTLYLQMNSLRAEDT | 146 |
| | | AVYYCAR | |
| | HFR4 | WGQGTTVTVSS | 147 |
| | LC | AIQLTQSPSSLSASVGDRVTITCRA | 450 |
| | | SQGISSALAWYQQTPGKAPKLLIYD | |
| | | ASSLESGVPSRFSGSGSGTDFSLTI | |
| | | GSLQPEDFASYYCQQFNSYPLTFGG | |
| | | GTKVEIKRTVAAPSVFIFPPSDEQL | |
| | | KSGTASVVCLLNNFYPREAKVQWKV | |
| | | DNALQSGNSQESVTEQDSKDSTYSL | |
| | | SSTLTLSKADYE | |
| | LC | AIQLTQSPSSLSASVGDRVTITCRA | 451 |
| | variable | SQGISSALAWYQQTPGKAPKLLIYD | |
| | | ASSLESGVPSRFSGSGSGTDFSLTI | |
| | | GSLQPEDFASYYCQQFNSYPLTFGG | |
| | | GTKVEIK | |
| | LCDR1 | RASQGISSALA | 386 |
| | LCDR2 | DASSLES | 387 |
| | LCDR3 | QQFNSYPLT | 452 |
| | LFR1 | AIQLTQSPSSLSASVGDRVTITC | 389 |
| | LFR2 | WYQQTPGKAPKLLIY | 453 |
| | LFR3 | GVPSRFSGSGSGTDFSLTIGSLQPE | 454 |
| | | DFASYYC | |
| | LFR4 | FGGGTKVEIK | 85 |
| S24-1301 | HC | QVQLVQSGAEVKKPGASVKVSCKVS | 455 |
| | | GYTLIELSMHWVRQAPGKGLEWMGG | |
| | | FDPEDGETIYAQKFQGRVTMTEDTS | |
| | | TDTAYMALSSLTSEDTAVYYCATAY | |
| | | AYYYASGGYYTLDYWGQGTLVTVSS | |
| | | ASTKGPSVFPLAPSSKSTSGGTAAL | |
| | | GCLVKDYFPEPVTVSWNSGALTSGV | |
| | | HTFPAVLQSSG | |
| | HC | QVQLVQSGAEVKKPGASVKVSCKVS | 456 |
| | variable | GYTLIELSMHWVRQAPGKGLEWMGG | |
| | | FDPEDGETIYAQKFQGRVTMTEDTS | |
| | | TDTAYMALSSLTSEDTAVYYCATAY | |
| | | AYYYASGGYYTLDYWGQGTLVTVSS | |
| | HCDR1 | ELSMH | 457 |
| | HCDR2 | GFDPEDGETIYAQKFQG | 458 |
| | HCDR3 | AYAYYYASGGYYTLDY | 459 |
| | HFR1 | QVQLVQSGAEVKKPGASVKVSCKVS | 460 |
| | | GYTLI | |
| | HFR2 | WVRQAPGKGLEWMG | 42 |
| | HFR3 | RVTMTEDTSTDTAYMALSSLTSEDT | 461 |
| | | AVYYCAT | |
| | HFR4 | WGQGTLVTVSS | 60 |
| | LC | QAGLTQPPSVSKGLRQTATLTCTGS | 462 |
| | | SNNVGNQGAAWLQQHQGHPPKLLSY | |
| | | RNNNRPSGISERFSASRSGNTASLT | |
| | | ITGLQPEDEADYYCSAWDSSLSNWV | |
| | | FGGGTKLTVLGQPKAAPSVTLFPPS | |
| | | SEELQANKATLVCLISDFYPGAVTV | |
| | | AWKADSSPVKAGVETTTPSKQSNNK | |
| | | YAASS | |
| | LC | QAGLTQPPSVSKGLRQTATLTCTGS | 463 |
| | variable | SNNVGNQGAAWLQQHQGHPPKLLSY | |
| | | RNNNRPSGISERFSASRSGNTASLT | |
| | | ITGLQPEDEADYYCSAWDSSLSNWV | |
| | | FGGGTKLTVL | |
| | LCDR1 | TGSSNNVGNQGAA | 464 |
| | LCDR2 | RNNNRPS | 465 |
| | LCDR3 | SAWDSSLSNWV | 466 |
| | LFR1 | QAGLTQPPSVSKGLRQTATLTC | 467 |
| | LFR2 | WLQQHQGHPPKLLSY | 468 |
| | LFR3 | GISERFSASRSGNTASLTITGLQPE | 469 |
| | | DEADYYC | |
| | LFR4 | FGGGTKLTVL | 69 |
| S24-223 | HC | QITLKESGPTLVKPTQTLTLTCTFS | 470 |
| | | GFSLNTSGVGVGWIRQPPGKALEWL | |
| | | ALIYWDDDKRYSPSLKSRLTITKDT | |
| | | SKNQVVLTMTNMDPVDTATYYCAHH | |
| | | TIVPIFDYWGQGTLVTVSSGSASAP | |
| | | TLFPLVSCENSPSDTSSV | |
| | HC | QITLKESGPTLVKPTQTLTLTCTFS | 471 |
| | variable | GFSLNTSGVGVGWIRQPPGKALEWL | |
| | | ALIYWDDDKRYSPSLKSRLTITKDT | |
| | | SKNQVVLTMTNMDPVDTATYYCAHH | |
| | | TIVPIFDYWGQGTLVTVSS | |
| | HCDR1 | TSGVGVG | 472 |
| | HCDR2 | LIYWDDDKRYSPSLKS | 473 |
| | HCDR3 | HTIVPIFDY | 474 |
| | HFR1 | QITLKESGPTLVKPTQTLTLTCTFS | 475 |
| | | GFSLN | |
| | HFR2 | WIRQPPGKALEWLA | 476 |
| | HFR3 | RLTITKDTSKNQVVLTMTNMDPVDT | 477 |
| | | ATYYCAH | |
| | HFR4 | WGQGTLVTVSS | 60 |
| | LC | QSALTQPASVSGSPGQSITISCTGT | 478 |
| | | SSDVGGYNYVSWYQQHPGKAPKLMI | |
| | | YDVSNRPSGVSNRFSGSKSGNTASL | |
| | | TISGLQAEDEADYYCNSYTSSSTLV | |
| | | VFGGGTKLTVLGQPKAAPSVTLFPP | |
| | | SSEELQANKATLVCLISDFYPGAVT | |
| | | VAWKADSSPVKAGVETTTPSKQSNN | |
| | | KYAASSYLSLT | |
| | LC | QSALTQPASVSGSPGQSITISCTGT | 479 |
| | variable | SSDVGGYNYVSWYQQHPGKAPKLMI | |
| | | YDVSNRPSGVSNRFSGSKSGNTASL | |
| | | TISGLQAEDEADYYCNSYTSSSTLV | |
| | | VFGGGTKLTVL | |
| | LCDR1 | TGTSSDVGGYNYVS | 63 |
| | LCDR2 | DVSNRPS | 64 |
| | LCDR3 | NSYTSSSTLVV | 480 |
| | LFR1 | QSALTQPASVSGSPGQSITISC | 66 |
| | LFR2 | WYQQHPGKAPKLMIY | 67 |
| | LFR3 | GVSNRFSGSKSGNTASLTISGLQAE | 68 |
| | | DEADYYC | |
| | LFR4 | FGGGTKLTVL | 69 |
| S24-461 | HC | QVQLQESGPGLVKPSETLSLTCTVS | 481 |
| | | GGSISSYYWSWIRQPPGKGLEWIGN | |
| | | IYNSGSTNYNPSLKSRLTISVDTSK | |
| | | NHFSLKLSSVTAADTAVYYCARGGL | |
| | | EHDGDYVYYYGMDVWGQGTTITVSS | |
| | | ASTKGPSVFPLAPSSKSTSGGTAAL | |
| | | GCLVKDYFPEPVTVSWNSGALTSGV | |
| | | HTFPAVLQSSG | |
| | HC | QVQLQESGPGLVKPSETLSLTCTVS | 482 |
| | variable | GGSISSYYWSWIRQPPGKGLEWIGN | |
| | | IYNSGSTNYNPSLKSRLTISVDTSK | |
| | | NHFSLKLSSVTAADTAVYYCARGGL | |
| | | EHDGDYVYYYGMDVWGQGTTITVSS | |
| | HCDR1 | SYYWS | 56 |
| | HCDR2 | NIYNSGSTNYNPSLKS | 483 |
| | HCDR3 | GGLEHDGDYVYYYGMDV | 484 |
| | HFR1 | QVQLQESGPGLVKPSETLSLTCTVS | 24 |
| | | GGSIS | |
| | HFR2 | WIRQPPGKGLEWIG | 7 |
| | HFR3 | RLTISVDTSKNHFSLKLSSVTAADT | 485 |
| | | AVYYCAR | |
| | HFR4 | WGQGTTITVSS | 486 |
| | LC | SYELTQPPSVSVSLGQMARITCSGE | 487 |
| | | ALPKKYAYWYQQKPGQFPILVIYKD | |
| | | SERPSGIPERFSGSSSGTIVTLTIS | |
| | | GVQAEDEADYYCLSEDSSGTWVFGG | |
| | | GTKLTVLGQPKAAPSVTLFPPSSEE | |
| | | LQANKATLVCLISDFYPGAVTVAWK | |
| | | ADSSPVKAGVETTTPSKQSNNKYAA | |
| | | SS | |
| | LC | SYELTQPPSVSVSLGQMARITCSGE | 488 |
| | variable | ALPKKYAYWYQQKPGQFPILVIYKD | |
| | | SERPSGIPERFSGSSSGTIVTLTIS | |
| | | GVQAEDEADYYCLSEDSSGTWVFGG | |
| | | GTKLTVL | |
| | LCDR1 | SGEALPKKYAY | 489 |
| | LCDR2 | KDSERPS | 490 |
| | LCDR3 | LSEDSSGTWV | 491 |
| | LFR1 | SYELTQPPSVSVSLGQMARITC | 492 |
| | LFR2 | WYQQKPGQFPILVIY | 493 |
| | LFR3 | GIPERFSGSSSGTIVTLTISGVQAE | 494 |
| | | DEADYYC | |
| | LFR4 | FGGGTKLTVL | 69 |
| S24-511 | HC | QVQLVESGGGVVQPGRSLRLSCAAS | 495 |
| | | GFTFSSYGMHWVRQAPGKGLEWVAV | |
| | | ISYDGSNKYYADSVKGRFTISRDNS | |
| | | KNTLYLQMNSLRAEDTAVYYCAKYT | |
| | | STVTTNYYYGMDVWGQGTTVTVSSA | |
| | | PTKAPDVFPIISGCRHPKDNSPVVL | |
| | | ACLITGYH | |
| | HC | QVQLVESGGGVVQPGRSLRLSCAAS | 496 |
| | variable | GFTFSSYGMHWVRQAPGKGLEWVAV | |
| | | ISYDGSNKYYADSVKGRFTISRDNS | |
| | | KNTLYLQMNSLRAEDTAVYYCAKYT | |
| | | STVTTNYYYGMDVWGQGTTVTVSS | |
| | HCDR1 | SYGMH | 141 |
| | HCDR2 | VISYDGSNKYYADSVKG | 497 |
| | HCDR3 | YTSTVTTNYYYGMDV | 498 |
| | HFR1 | QVQLVESGGGVVQPGRSLRLSCAAS | 144 |
| | | GFTFS | |
| | HFR2 | WVRQAPGKGLEWVA | 145 |
| | HFR3 | RFTISRDNSKNTLYLQMNSLRAEDT | 499 |
| | | AVYYCAK | |
| | HFR4 | WGQGTTVTVSS | 147 |
| | LC | SYELTQPPSVSVSPGQTASITCSGD | 500 |
| | | KLGDKYACWYQQKPGQSPVLVIYQD | |
| | | SKRPSGIPERFSGSNSGNTATLTIS | |
| | | GTQAMDEADYYCQAWDSSTVVFGGG | |
| | | TKLTVLGQPKAAPSVTLFPPSSEEL | |
| | | QANKATLVCLISDFYPGAVTVAWKA | |
| | | DSSPVKAGVETTTPSKQSNNKYAAS | |
| | | SY | |
| | LC | SYELTQPPSVSVSPGQTASITCSGD | 501 |
| | variable | KLGDKYACWYQQKPGQSPVLVIYQD | |
| | | SKRPSGIPERFSGSNSGNTATLTIS | |
| | | GTQAMDEADYYCQAWDSSTVVFGGG | |
| | | TKLTVL | |
| | LCDR1 | SGDKLGDKYAC | 502 |
| | LCDR2 | QDSKRPS | 503 |
| | LCDR3 | QAWDSSTVV | 504 |
| | LFR1 | SYELTQPPSVSVSPGQTASITC | 368 |
| | LFR2 | WYQQKPGQSPVLVIY | 369 |
| | LFR3 | GIPERFSGSNSGNTATLTISGTQAM | 370 |
| | | DEADYYC | |
| | LFR4 | FGGGTKLTVL | 69 |
| S24-788 | HC | QVQLVESGGGVVQPGRSLRLSCAAS | 505 |
| | | GFTFSSYGMHWVRQAPGKGLEWVAV | |
| | | IWYDGSNKYYADSVKGRFTISRDNS | |
| | | KNTLYLQMNSLRAEDTAVYYCARGR | |
| | | SPGGGHYYGMDVWGQGTTVTVSSGS | |
| | | ASAPTLFPLVSCENSPSDTSSV | |
| | HC | QVQLVESGGGVVQPGRSLRLSCAAS | 506 |
| | variable | GFTFSSYGMHWVRQAPGKGLEWVAV | |
| | | IWYDGSNKYYADSVKGRFTISRDNS | |
| | | KNTLYLQMNSLRAEDTAVYYCARGR | |
| | | SPGGGHYYGMDVWGQGTTVTVSS | |
| | HCDR1 | SYGMH | 141 |
| | HCDR2 | VIWYDGSNKYYADSVKG | 142 |
| | HCDR3 | GRSPGGGHYYGMDV | 507 |
| | HFR1 | QVQLVESGGGVVQPGRSLRLSCAAS | 144 |
| | | GFTFS | |
| | HFR2 | WVRQAPGKGLEWVA | 145 |
| | HFR3 | RFTISRDNSKNTLYLQMNSLRAEDT | 146 |
| | | AVYYCAR | |
| | HFR4 | WGQGTTVTVSS | 147 |
| | LC | SYELTQPPSVSVSPGQTASITCSGD | 508 |
| | | KLGDKYACWYQQKPGQSPVLVIYQD | |
| | | SKRPSGIPERFSGSNSGNTATLTIS | |
| | | GTQAMDEADYYCQAWDSSSVVFGGG | |
| | | TKLTVLGQPKAAPSVTLFPPSSEEL | |
| | | QANKATLVCLISDFYPGAVTVAWKA | |
| | | DSSPVKAGVETTTPSKQSNNKYAAS | |
| | | S | |
| | LC | SYELTQPPSVSVSPGQTASITCSGD | 509 |
| | variable | KLGDKYACWYQQKPGQSPVLVIYQD | |
| | | SKRPSGIPERFSGSNSGNTATLTIS | |
| | | GTQAMDEADYYCQAWDSSSVVFGGG | |
| | | TKLTVL | |
| | LCDR1 | SGDKLGDKYAC | 502 |
| | LCDR2 | QDSKRPS | 503 |
| | LCDR3 | QAWDSSSVV | 510 |
| | LFR1 | SYELTQPPSVSVSPGQTASITC | 368 |
| | LFR2 | WYQQKPGQSPVLVIY | 369 |
| | LFR3 | GIPERFSGSNSGNTATLTISGTQAM | 370 |
| | | DEADYYC | |
| | LFR4 | FGGGTKLTVL | 69 |
| S24-821 | HC | QVTLRESGPALVKPTQTLTLTCTFS | 511 |
| | | GLSLSSSGMCVSWIRQPPGKALEWL | |
| | | ARIDWDDDKYYSTSLKTRLTISKDT | |
| | | SKNQVVLTMTNMDPVDTATYYCARI | |
| | | CTMVRGLHDAFDIWGQGTMVTVSSG | |
| | | SASAPTLFPLVSCENSPSDTSSV | |
| | HC | QVTLRESGPALVKPTQTLTLTCTFS | 512 |
| | variable | GLSLSSSGMCVSWIRQPPGKALEWL | |
| | | ARIDWDDDKYYSTSLKTRLTISKDT | |
| | | SKNQVVLTMTNMDPVDTATYYCARI | |
| | | CTMVRGLHDAFDIWGQGTMVTVSS | |
| | HCDR1 | SSGMCVS | 513 |
| | HCDR2 | RIDWDDDKYYSTSLKT | 514 |
| | HCDR3 | ICTMVRGLHDAFDI | 515 |
| | HFR1 | QVTLRESGPALVKPTQTLTLTCTFS | 516 |
| | | GLSLS | |
| | HFR2 | WIRQPPGKALEWLA | 476 |
| | HFR3 | RLTISKDTSKNQVVLTMTNMDPVDT | 517 |
| | | ATYYCAR | |
| | HFR4 | WGQGTMVTVSS | 44 |
| | LC | DIQMTQSPSTLSASVGDRVTITCRA | 518 |
| | | SQSISSWLAWYQQKPGKAPKLLIYK | |
| | | ASSLESGVPSRFSGSGSGTEFTLTI | |
| | | SSLQPDDFATYYCQQYNSYSWTFGQ | |
| | | GTKVEIKRTVAAPSVFIFPPSDEQL | |
| | | KSGTASVVCLLNNFYPREAKVQWKV | |
| | | DN | |
| | LC | DIQMTQSPSTLSASVGDRVTITCRA | 519 |
| | variable | SQSISSWLAWYQQKPGKAPKLLIYK | |
| | | ASSLESGVPSRFSGSGSGTEFTLTI | |
| | | SSLQPDDFATYYCQQYNSYSWTFGQ | |
| | | GTKVEIK | |
| | LCDR1 | RASQSISSWLA | 520 |
| | LCDR2 | KASSLES | 521 |
| | LCDR3 | QQYNSYSWT | 522 |
| | LFR1 | DIQMTQSPSTLSASVGDRVTITC | 523 |
| | LFR2 | WYQQKPGKAPKLLIY | 252 |
| | LFR3 | GVPSRFSGSGSGTEFTLTISSLQPD | 524 |
| | | DFATYYC | |
| | LFR4 | FGQGTKVEIK | 53 |
| S144-67 | HC | EVQLVQSGAEVKKPGESLKISCKGS | 525 |
| | | GYSFTTYWIAWVRQMPGKGLEWVGI | |
| | | IYPDDSDTRYSPSFQGQVTISADKS | |
| | | IGTAYLQWSSLKASDTAMYYCARGQ | |
| | | YYDFWSGAGGVDVWGQGTTVTVSSA | |
| | | STKGPSVFPLAPSSKSTSGGTAALG | |
| | | CLVKDYFPEPVTVSWNSGALTSGVH | |
| | | TFPAVLQSSG | |
| | HC | EVQLVQSGAEVKKPGESLKISCKGS | 526 |
| | variable | GYSFTTYWIAWVRQMPGKGLEWVGI | |
| | | IYPDDSDTRYSPSFQGQVTISADKS | |
| | | IGTAYLQWSSLKASDTAMYYCARGQ | |
| | | YYDFWSGAGGVDVWGQGTTVTVSS | |
| | HCDR1 | TYWIA | 527 |
| | HCDR2 | IIYPDDSDTRYSPSFQG | 528 |
| | HCDR3 | GQYYDFWSGAGGVDV | 529 |
| | HFR1 | EVQLVQSGAEVKKPGESLKISCKGS | 530 |
| | | GYSFT | |
| | HFR2 | WVRQMPGKGLEWVG | 531 |
| | HFR3 | QVTISADKSIGTAYLQWSSLKASDT | 532 |
| | | AMYYCAR | |
| | HFR4 | WGQGTTVTVSS | 147 |
| | LC | QSVLTQPPSVSGAPGQRVTISCTGS | 533 |
| | | RSNIGAGYDVQWYQQVPGTAPKLLI | |
| | | SGNSNRPSGVPDRFSGSKSGTSASL | |
| | | AITGLQAEDEADYYCQSYDSSLSGL | |
| | | RVFGGGTKLTVLGQPKAAPSVTLFP | |
| | | PSSEELQANKATLVCLISDFYPGAV | |
| | | TVAWKADSSPVKAGVETTTPSKQSN | |
| | | NKYAASSYLSLTPEQWKSH | |
| | LC | QSVLTQPPSVSGAPGQRVTISCTGS | 534 |
| | variable | RSNIGAGYDVQWYQQVPGTAPKLLI | |
| | | SGNSNRPSGVPDRFSGSKSGTSASL | |
| | | AITGLQAEDEADYYCQSYDSSLSGL | |
| | | RVFGGGTKLTVL | |
| | LCDR1 | TGSRSNIGAGYDVQ | 535 |
| | LCDR2 | GNSNRPS | 350 |
| | LCDR3 | QSYDSSLSGLRV | 536 |
| | LFR1 | QSVLTQPPSVSGAPGQRVTISC | 537 |
| | LFR2 | WYQQVPGTAPKLLIS | 538 |
| | LFR3 | GVPDRFSGSKSGTSASLAITGLQAE | 539 |
| | | DEADYYC | |
| | LFR4 | FGGGTKLTVL | 69 |
| S144-69 | HC | EVQLVQSGAEVKKPGESLKISCKGS | 540 |
| | | GYSFTSYWIGWVRQMPGKGLEWMGI | |
| | | IYPGDSDTRYSPSFQGQVTISADKS | |
| | | ITTAYLQWSSLKASDTAMYYCARTQ | |
| | | TTNWFDSWGQGTLVTVSSASTKGPS | |
| | | VFPLAPSSKSTSGGTAALGCLVKDY | |
| | | FPEPVTVSWNSGALTSGVHTFPAVL | |
| | | QSSG | |
| | HC | EVQLVQSGAEVKKPGESLKISCKGS | 541 |
| | variable | GYSFTSYWIGWVRQMPGKGLEWMGI | |
| | | IYPGDSDTRYSPSFQGQVTISADKS | |
| | | ITTAYLQWSSLKASDTAMYYCARTQ | |
| | | TTNWFDSWGQGTLVTVSS | |
| | HCDR1 | SYWIG | 542 |
| | HCDR2 | IIYPGDSDTRYSPSFQG | 543 |
| | HCDR3 | TQTTNWFDS | 544 |
| | HFR1 | EVQLVQSGAEVKKPGESLKISCKGS | 530 |
| | | GYSFT | |
| | HFR2 | WVRQMPGKGLEWMG | 174 |
| | HFR3 | QVTISADKSITTAYLQWSSLKASDT | 545 |
| | | AMYYCAR | |
| | HFR4 | WGQGTLVTVSS | 60 |
| | LC | DIQMTQSPSTLSVSVGDRVTITCRA | 546 |
| | | SQSVSSWLAWYQQKPGKAPKLLIYD | |
| | | ASSLESGVPSRFSGSGSGTEFTLTI | |
| | | SSLQPDDFATYYCQQYNSFYTFGQG | |
| | | TKLEIKRTVAAPSVFIFPPSDEQLK | |
| | | SGTASVVCLLNNFYPREAKVQWKVD | |
| | | NALQSGNSQESVTEQDSKDSTYSLS | |
| | | STLTLSKADYE | |
| | LC | DIQMTQSPSTLSVSVGDRVTITCRA | 547 |
| | variable | SQSVSSWLAWYQQKPGKAPKLLIYD | |
| | | ASSLESGVPSRFSGSGSGTEFTLTI | |
| | | SSLQPDDFATYYCQQYNSFYTFGQG | |
| | | TKLEIK | |
| | LCDR1 | RASQSVSSWLA | 548 |
| | LCDR2 | DASSLES | 387 |
| | LCDR3 | QQYNSFYT | 549 |
| | LFR1 | DIQMTQSPSTLSVSVGDRVTITC | 550 |
| | LFR2 | WYQQKPGKAPKLLIY | 252 |
| | LFR3 | GVPSRFSGSGSGTEFTLTISSLQPD | 524 |
| | | DFATYYC | |
| | LFR4 | FGQGTKLEIK | 380 |
| S144-94 | HC | QVQLVESGGGVVQPGGSLRLSCAAS | 551 |
| | | GFTFSSYGMHWVRQAPGKGLEWVTF | |
| | | TRYDGSNKFYADSVKGRFSISRDNS | |
| | | KNTLYLQMNSLRAEDTAVYYCAKES | |
| | | RVAFGGAIAIYYFGMDVWGQGTTVT | |
| | | VSSASTKGPSVFPLAPCSRSTSGGT | |
| | | AALGCLVKDYFPEPVTVSWNSGALT | |
| | | SGVHTFPAVLQSSG | |
| | HC | QVQLVESGGGVVQPGGSLRLSCAAS | 552 |
| | variable | GFTFSSYGMHWVRQAPGKGLEWVTF | |
| | | TRYDGSNKFYADSVKGRFSISRDNS | |
| | | KNTLYLQMNSLRAEDTAVYYCAKES | |
| | | RVAFGGAIAIYYFGMDVWGQGTTVT | |
| | | VSS | |
| | HCDR1 | SYGMH | 141 |
| | HCDR2 | FTRYDGSNKFYADSVKG | 553 |
| | HCDR3 | ESRVAFGGAIAIYYFGMDV | 554 |
| | HFR1 | QVQLVESGGGVVQPGGSLRLSCAAS | 555 |
| | | GFTFS | |
| | HFR2 | WVRQAPGKGLEWVT | 556 |
| | HFR3 | RFSISRDNSKNTLYLQMNSLRAEDT | 557 |
| | | AVYYCAK | |
| | HFR4 | WGQGTTVTVSS | 147 |
| | LC | DIVMTQSPLSLPVTPGEPASISCRS | 558 |
| | | SQSLLHSNGYNYLDWYLQKPGQSPQ | |
| | | LLIYLGSNRASGVPDRFSGSGSGTD | |
| | | FTLKISRVEAEDVGVYYCMQALQTP | |
| | | QYTFGQGTKLEIKRTVAAPSVFIFP | |
| | | PSDEQLKSGTASVVCLLNNFYPREA | |
| | | KVQWKVDNALQSGNSQESVTEQDSK | |
| | | DSTYSLSSTLTLSKADYE | |
| | LC | DIVMTQSPLSLPVTPGEPASISCRS | 559 |
| | variable | SQSLLHSNGYNYLDWYLQKPGQSPQ | |
| | | LLIYLGSNRASGVPDRFSGSGSGTD | |
| | | FTLKISRVEAEDVGVYYCMQALQTP | |
| | | QYTFGQGTKLEIK | |
| | LCDR1 | RSSQSLLHSNGYNYLD | 262 |
| | LCDR2 | LGSNRAS | 263 |
| | LCDR3 | MQALQTPQYT | 560 |
| | LFR1 | DIVMTQSPLSLPVTPGEPASISC | 265 |
| | LFR2 | WYLQKPGQSPQLLIY | 266 |
| | LFR3 | GVPDRFSGSGSGTDFTLKISRVEAE | 267 |
| | | DVGVYYC | |
| | LFR4 | FGQGTKLEIK | 380 |
| S144-113 | HC | EVQLLESGGGLVQPGGSLRLSCAAS | 561 |
| | | GFTFSNYAMSWVRQAPGKGLEWVSA | |
| | | IRNSGSSTYYADSVKGRFTISRDNS | |
| | | KNTLYLQMNSLRAEDSAVYYCAKVG | |
| | | GTAAGHPFYDYWGQGTLVTVSSAST | |
| | | KGPSVFPLAPSSKSTSGGTAALGCL | |
| | | VKDYFPEPVTVSWNSGALTSGVHTF | |
| | | PAVLQSSGL | |
| | HC | EVQLLESGGGLVQPGGSLRLSCAAS | 562 |
| | variable | GFTFSNYAMSWVRQAPGKGLEWVSA | |
| | | IRNSGSSTYYADSVKGRFTISRDNS | |
| | | KNTLYLQMNSLRAEDSAVYYCAKVG | |
| | | GTAAGHPFYDYWGQGTLVTVSS | |
| | HCDR1 | NYAMS | 563 |
| | HCDR2 | AIRNSGSSTYYADSVKG | 564 |
| | HCDR3 | VGGTAAGHPFYDY | 565 |
| | HFR1 | EVQLLESGGGLVQPGGSLRLSCAAS | 566 |
| | | GFTFS | |
| | HFR2 | WVRQAPGKGLEWVS | 130 |
| | HFR3 | RFTISRDNSKNTLYLQMNSLRAEDS | 567 |
| | | AVYYCAK | |
| | HFR4 | WGQGTLVTVSS | 60 |
| | LC | DIQMTQSPSSLSASVGDRVTITCRA | 568 |
| | | SQSISNYLNWYQQKPGKAPDLLIYA | |
| | | ASSLQSGVPLRFSGSGSGTDFTLTI | |
| | | SSLQPEDFATYYCQQTYSAPTFGGG | |
| | | TKVEIKRTVAAPSVFIFPPSDEQLK | |
| | | SGTASVVCLLNNFYPREAKVQWKVD | |
| | | NALQSGNSQESVTEQDSKDSTYSLS | |
| | | STLTLSKADYE | |
| | LC | DIQMTQSPSSLSASVGDRVTITCRA | 569 |
| | variable | SQSISNYLNWYQQKPGKAPDLLIYA | |
| | | ASSLQSGVPLRFSGSGSGTDFTLTI | |
| | | SSLQPEDFATYYCQQTYSAPTFGGG | |
| | | TKVEIK | |
| | LCDR1 | RASQSISNYLN | 570 |
| | LCDR2 | AASSLQS | 249 |
| | LCDR3 | QQTYSAPT | 571 |
| | LFR1 | DIQMTQSPSSLSASVGDRVTITC | 251 |
| | LFR2 | WYQQKPGKAPDLLIY | 572 |
| | LFR3 | GVPLRFSGSGSGTDFTLTISSLQPE | 573 |
| | | DFATYYC | |
| | LFR4 | FGGGTKVEIK | 85 |
| S144-175 | HC | [sequence omitted] | 574 |
| | | GYTFTGYYMHWVRQAPGQGLEWMGR | |
| | | INPNSGGTNFAQRFQGRVSMTRDTS | |
| | | ISTAYMELSSLRSDDTAVYYCARGA | |
| | | KFEHLPFDIWGQGTMVTVSSASTKG | |
| | | PSVFPLAPSSKSTSGGTAALGCLVK | |
| | | DYFPEPVTVSWNSGALTSGVHTFPA | |
| | | VLQSSG | |
| | HC | [sequence omitted] | 575 |
| | variable | GYTFTGYYMHWVRQAPGQGLEWMGR | |
| | | INPNSGGTNFAQRFQGRVSMTRDTS | |
| | | ISTAYMELSSLRSDDTAVYYCARGA | |
| | | KFEHLPFDIWGQGTMVTVSS | |
| | HCDR1 | GYYMH | 187 |
| | HCDR2 | RINPNSGGTNFAQRFQG | 576 |
| | HCDR3 | GAKFEHLPFDI | 577 |
| | HFR1 | [sequence omitted] | 190 |
| | | GYTFT | |
| | HFR2 | WVRQAPGQGLEWMG | 160 |
| | HFR3 | RVSMTRDTSISTAYMELSSLRSDDT | 578 |
| | | AVYYCAR | |
| | HFR4 | WGQGTMVTVSS | 44 |
| | LC | QSMLTQPPSASGTPGQRVTISCSGS | 579 |
| | | SSNIGSNYVYWYQQLPGTAPKLLIY | |
| | | RNNQRPSGVPDRFSGSKSGTSASLA | |
| | | ISGLRSEDEADYYCAAWDDRRWVFG | |
| | | GGTKLTVLGQPKAAPSVTLFPPSSE | |
| | | ELQANKATLVCLISDFYPGAVTVAW | |
| | | KADSSPVKAGVETTTPSKQSNNKYA | |
| | | ASS | |
| | LC | QSMLTQPPSASGTPGQRVTISCSGS | 580 |
| | variable | SSNIGSNYVYWYQQLPGTAPKLLIY | |
| | | RNNQRPSGVPDRFSGSKSGTSASLA | |
| | | ISGLRSEDEADYYCAAWDDRRWVFG | |
| | | GGTKLTVL | |
| | LCDR1 | SGSSSNIGSNYVY | 403 |
| | LCDR2 | RNNQRPS | 404 |
| | LCDR3 | AAWDDRRWV | 581 |
| | LFR1 | QSMLTQPPSASGTPGQRVTISC | 582 |
| | LFR2 | WYQQLPGTAPKLLIY | 122 |
| | LFR3 | GVPDRFSGSKSGTSASLAISGLRSE | 406 |
| | | DEADYYC | |
| | LFR4 | FGGGTKLTVL | 69 |
| S144-208 | HC | QVQLVQSGAEVKKPGASVKVSCKSS | 583 |
| | | GYTFTGYYMHWVRQAPGQGLEWMGR | |
| | | INPNSGGTNYAQKFQGRVTMTRDTS | |
| | | ISTAYMELSRLRSDDTAVYYCARGA | |
| | | RGGAGCSGWSCFDFWGQGTLVTVSS | |
| | | ASTKGPSVFPLAPSSKSTSGGTAAL | |
| | | GCLVKDYFPEPVTVSWNSGALTSGV | |
| | | HTFPAVLQSSG | |
| | HC | QVQLVQSGAEVKKPGASVKVSCKSS | 584 |
| | variable | GYTFTGYYMHWVRQAPGQGLEWMGR | |
| | | INPNSGGTNYAQKFQGRVTMTRDTS | |
| | | ISTAYMELSRLRSDDTAVYYCARGA | |
| | | RGGAGCSGWSCFDFWGQGTLVTVSS | |
| | HCDR1 | GYYMH | 187 |
| | HCDR2 | RINPNSGGTNYAQKFQG | 585 |
| | HCDR3 | GARGGAGCSGWSCFDF | 586 |
| | HFR1 | QVQLVQSGAEVKKPGASVKVSCKSS | 587 |
| | | GYTFT | |
| | HFR2 | WVRQAPGQGLEWMG | 160 |
| | HFR3 | RVTMTRDTSISTAYMELSRLRSDDT | 588 |
| | | AVYYCAR | |
| | HFR4 | WGQGTLVTVSS | 60 |
| | LC | QSALTQPRSVSGSPGQSVTISCTGT | 589 |
| | | SSDVGGYKYVSWYQQHPGKAPKLMI | |
| | | YDVSKRPSGVPDRFSGSKSGNTASL | |
| | | TISGLQAEDEGDYYCCSYAGTYSLV | |
| | | FGGGTKVTVTVLGQPKAAPSVTLFP | |
| | | PSSEELQANKATLVCLISDFYPGAV | |
| | | TVAWKADSSPVKAGVETTTPSKQSN | |
| | | NKYAASSYLSLTPEQWKSH | |
| | LC | QSALTQPRSVSGSPGQSVTISCTGT | 590 |
| | variable | SSDVGGYKYVSWYQQHPGKAPKLMI | |
| | | YDVSKRPSGVPDRFSGSKSGNTASL | |
| | | TISGLQAEDEGDYYCCSYAGTYSLV | |
| | | FGGGTKVTV | |
| | LCDR1 | TGTSSDVGGYKYVS | 591 |
| | LCDR2 | DVSKRPS | 592 |
| | LCDR3 | CSYAGTYSLV | 593 |
| | LFR1 | QSALTQPRSVSGSPGQSVTISC | 594 |
| | LFR2 | WYQQHPGKAPKLMIY | 67 |
| | LFR3 | GVPDRFSGSKSGNTASLTISGLQAE | 595 |
| | | DEGDYYC | |
| | LFR4 | FGGGTKVTV | 596 |
| S144-339 | HC | EVQLVESGGGLVKPGGSLRLSCAAS | 597 |
| | | GFTFSDYTMNWVRQAPGKGLEWVSS | |
| | | ITRSSTYIYYADSVKGRFTISRDNA | |
| | | KNSLYLQMNSLRAEDTAVYYCARDP | |
| | | YYDILTGYWNYWGQGTLVTVSSAST | |
| | | KGPSVFPLAPSSKSTSGGTAALGCL | |
| | | VKDYFPEPVTVSWNSGALTSGVHTF | |
| | | PAVLQSSG | |
| | HC | EVQLVESGGGLVKPGGSLRLSCAAS | 598 |
| | variable | GFTFSDYTMNWVRQAPGKGLEWVSS | |
| | | ITRSSTYIYYADSVKGRFTISRDNA | |
| | | KNSLYLQMNSLRAEDTAVYYCARDP | |
| | | YYDILTGYWNYWGQGTLVTVSS | |
| | HCDR1 | DYTMN | 599 |
| | HCDR2 | SITRSSTYIYYADSVKG | 600 |
| | HCDR3 | DPYYDILTGYWNY | 601 |
| | HFR1 | EVQLVESGGGLVKPGGSLRLSCAAS | 602 |
| | | GFTFS | |
| | HFR2 | WVRQAPGKGLEWVS | 130 |
| | HFR3 | RFTISRDNAKNSLYLQMNSLRAEDT | 273 |
| | | AVYYCAR | |
| | HFR4 | WGQGTLVTVSS | 60 |
| | LC | EIVLTQSPGTLSLSPGERATLSCRA | 603 |
| | | SQSLSSSYLAWYQQKPGQSPRLLIY | |
| | | GASSRATGIPDRFSGSGSGTDFTLT | |
| | | INRLEPEDFAVYYCQQYRTSPRGTF | |
| | | GGGTKVEIKRTVAAPSVFIFPPSDE | |
| | | QLKSGTASVVCLLNNFYPREAKVQW | |
| | | KVDNALQSGNSQESVTEQDSKDSTY | |
| | | SLSSTLTLSKADYE | |
| | LC | EIVLTQSPGTLSLSPGERATLSCRA | 604 |
| | variable | SQSLSSSYLAWYQQKPGQSPRLLIY | |
| | | GASSRATGIPDRFSGSGSGTDFTLT | |
| | | INRLEPEDFAVYYCQQYRTSPRGTF | |
| | | GGGTKVEIK | |
| | LCDR1 | RASQSLSSSYLA | 605 |
| | LCDR2 | GASSRAT | 135 |
| | LCDR3 | QQYRTSPRGT | 606 |
| | LFR1 | EIVLTQSPGTLSLSPGERATLSC | 50 |
| | LFR2 | WYQQKPGQSPRLLIY | 607 |
| | LFR3 | GIPDRFSGSGSGTDFTLTINRLEPE | 138 |
| | | DFAVYYC | |
| | LFR4 | FGGGTKVEIK | 85 |
| S144-359 | HC | [sequence omitted] | 608 |
| | | GFTFSSYAMSWVRQAPGKGLEWVSS | |
| | | IRGSGGSTYYADSVKGRFTISRDNS | |
| | | KYTLYLQMNSLRAEDTAVYYCAKIT | |
| | | GAVGGENWFDPWGQGTLVTVSSAST | |
| | | KGPSVFPLAPCSRSTSGGTAALGCL | |
| | | VKDYFPEPVTVSWNSGALTSGVHTF | |
| | | PAVLQSSG | |
| | HC | [sequence omitted] | 609 |
| | variable | GFTFSSYAMSWVRQAPGKGLEWVSS | |
| | | IRGSGGSTYYADSVKGRFTISRDNS | |
| | | KYTLYLQMNSLRAEDTAVYYCAKIT | |
| | | GAVGGENWFDPWGQGTLVTVSS | |
| | HCDR1 | SYAMS | 610 |
| | HCDR2 | SIRGSGGSTYYADSVKG | 611 |
| | HCDR3 | ITGAVGGENWFDP | 612 |
| | HFR1 | [sequence omitted] | 613 |
| | | GFTFS | |
| | HFR2 | WVRQAPGKGLEWVS | 130 |
| | HFR3 | RFTISRDNSKYTLYLQMNSLRAEDT | 614 |
| | | AVYYCAK | |
| | HFR4 | WGQGTLVTVSS | 60 |
| | LC | DIQMTQSPSSLSASVGDRVTITCRA | 615 |
| | | SQSISSYLNWYQQKPGKAPKLLIYA | |
| | | ASSLQSGVPSRFSGSGSGTDFTLTI | |
| | | SSLQPEDFAIYYCQQTSRTPLTFGG | |
| | | GTKVEVKRTVAAPSVFIFPPSDEQL | |
| | | KSGTASVVCLLNNFYPREAKVQWKV | |
| | | DNALQSGNSQESVTEQDSKDSTYSL | |
| | | SSTLTLSKADYE | |
| | LC | DIQMTQSPSSLSASVGDRVTITCRA | 616 |
| | variable | SQSISSYLNWYQQKPGKAPKLLIYA | |
| | | ASSLQSGVPSRFSGSGSGTDFTLTI | |
| | | SSLQPEDFAIYYCQQTSRTPLTFGG | |
| | | GTKVEVK | |
| | LCDR1 | RASQSISSYLN | 248 |
| | LCDR2 | AASSLQS | 249 |
| | LCDR3 | QQTSRTPLT | 617 |
| | LFR1 | DIQMTQSPSSLSASVGDRVTITC | 251 |
| | LFR2 | WYQQKPGKAPKLLIY | 252 |
| | LFR3 | GVPSRFSGSGSGTDFTLTISSLQPE | 618 |
| | | DFAIYYC | |
| | LFR4 | FGGGTKVEVK | 619 |
| S144-460 | HC | EVRLVQSGGGLVKPGGSLRLSCAAS | 620 |
| | | GFTFSTAWVRWVRQAPGKGLECVGR | |
| | | IKSKNDGDRAEYAAPARGRFIISRD | |
| | | DAENILYLQMNNLKTEDTAFYYCTT | |
| | | DQGNSSAFYSADYWGQGTLVTVSSA | |
| | | SPTSPKVFPLSLDSTPQDGNVVVAC | |
| | | LVQGFFPQEPLSVTWSESGQNVTAR | |
| | | NF | |
| | HC | EVRLVQSGGGLVKPGGSLRLSCAAS | 621 |
| | variable | GFTFSTAWVRWVRQAPGKGLECVGR | |
| | | IKSKNDGDRAEYAAPARGRFIISRD | |
| | | DAENILYLQMNNLKTEDTAFYYCTT | |
| | | DQGNSSAFYSADYWGQGTLVTVSS | |
| | HCDR1 | TAWVR | 622 |
| | HCDR2 | RIKSKNDGDRAEYAAPARG | 623 |
| | HCDR3 | DQGNSSAFYSADY | 624 |
| | HFR1 | EVRLVQSGGGLVKPGGSLRLSCAAS | 625 |
| | | GFTFS | |
| | HFR2 | WVRQAPGKGLECVG | 626 |
| | HFR3 | RFIISRDDAENILYLQMNNLKTEDT | 627 |
| | | AFYYCTT | |
| | HFR4 | WGQGTLVTVSS | 60 |
| | LC | DIQMTQSPSAMSASVGDRVTITCRA | 628 |
| | | SQDINTFLTWFQQKPGKVPQRLIFA | |
| | | AYRLQSGVPSRFSGSGSGTEFTLTI | |
| | | NSLQPEDVATYYCLHHKTYPYTFGQ | |
| | | GTKLEIKRTVAAPSVFIFPPSDEQL | |
| | | KSGTASVVCLLNNFYPREAKVQWKV | |
| | | DNALQSGNSQESVTEQDSKDSTYSL | |
| | | SSTLTLSKADYE | |
| | LC | DIQMTQSPSAMSASVGDRVTITCRA | 629 |
| | variable | SQDINTFLTWFQQKPGKVPQRLIFA | |
| | | AYRLQSGVPSRFSGSGSGTEFTLTI | |
| | | NSLQPEDVATYYCLHHKTYPYTFGQ | |
| | | GTKLEIK | |
| | LCDR1 | RASQDINTFLT | 630 |
| | LCDR2 | AAYRLQS | 631 |
| | LCDR3 | LHHKTYPYT | 632 |
| | LFR1 | DIQMTQSPSAMSASVGDRVTITC | 633 |
| | LFR2 | WFQQKPGKVPQRLIF | 634 |
| | LFR3 | GVPSRFSGSGSGTEFTLTINSLQPE | 635 |
| | | DVATYYC | |
| | LFR4 | FGQGTKLEIK | 380 |
| S144-466 | HC | EVQLVQSGAEVKKPGESLKISCKGS | 636 |
| | | GYRFTRYWIGWVRQMPGKGLEWMGI | |
| | | IYLGDSETRYSPSFQGQVTISADNS | |
| | | ISTAYLQWSSLKASDTAMYYCARSS | |
| | | NWNYGDYWGQGTLVTVSSASTKGPS | |
| | | VFPLAPCSRSTSGGTAALGCLVKDY | |
| | | FPEPVTVSWNSGALTSGVHTFPAVL | |
| | | QSSG | |
| | HC | EVQLVQSGAEVKKPGESLKISCKGS | 637 |
| | variable | GYRFTRYWIGWVRQMPGKGLEWMGI | |
| | | IYLGDSETRYSPSFQGQVTISADNS | |
| | | ISTAYLQWSSLKASDTAMYYCARSS | |
| | | NWNYGDYWGQGTLVTVSS | |
| | HCDR1 | RYWIG | 638 |
| | HCDR2 | IIYLGDSETRYSPSFQG | 639 |
| | HCDR3 | SSNWNYGDY | 640 |
| | HFR1 | EVQLVQSGAEVKKPGESLKISCKGS | 641 |
| | | GYRFT | |
| | HFR2 | WVRQMPGKGLEWMG | 174 |
| | HFR3 | QVTISADNSISTAYLQWSSLKASDT | 642 |
| | | AMYYCAR | |
| | HFR4 | WGQGTLVTVSS | 60 |
| | LC | DIQMTQSPSTLSASVGDRVTITCRA | 643 |
| | | SQSITSWLAWYQQKSGKAPKLLIYD | |
| | | ASSLESGVPSRFSGSGSGTEFTLTI | |
| | | SSLQPDDFATYYCQQYNSYPWTFGQ | |
| | | GTKVEIKRTVAAPSVFIFPPSDEQL | |
| | | KSGTASVVCLLNNFYPREAKVQWKV | |
| | | DNALQSGNSQESVTEQDSKDSTYSL | |
| | | SSTLTLSKADYE | |
| | LC | DIQMTQSPSTLSASVGDRVTITCRA | 644 |
| | variable | SQSITSWLAWYQQKSGKAPKLLIYD | |
| | | ASSLESGVPSRFSGSGSGTEFTLTI | |
| | | SSLQPDDFATYYCQQYNSYPWTFGQ | |
| | | GTKVEIK | |
| | LCDR1 | RASQSITSWLA | 645 |
| | LCDR2 | DASSLES | 387 |
| | LCDR3 | QQYNSYPWT | 646 |
| | LFR1 | DIQMTQSPSTLSASVGDRVTITC | 523 |
| | LFR2 | WYQQKSGKAPKLLIY | 647 |
| | LFR3 | GVPSRFSGSGSGTEFTLTISSLQPD | 524 |
| | | DFATYYC | |
| | LFR4 | FGQGTKVEIK | 53 |
| S144-469 | HC | QVQLQESGPGLVKPSETLSLTCTVS | 648 |
| | | GGSISSDYWSWIRQPPGKGLEWIGY | |
| | | MYYSGSTNYNPSLKSRVTISVDTSK | |
| | | NQFSLKLSSVTAADTAVYYCARWDR | |
| | | GSRPHYYYYGMDVWGQGTTVTVSSA | |
| | | STKGPSVFPLAPSSKSTSGGTAALG | |
| | | CLVKDYFPEPVTVSWNSGALTSGVH | |
| | | TFPAVLQSSG | |
| | HC | QVQLQESGPGLVKPSETLSLTCTVS | 649 |
| | variable | GGSISSDYWSWIRQPPGKGLEWIGY | |
| | | MYYSGSTNYNPSLKSRVTISVDTSK | |
| | | NQFSLKLSSVTAADTAVYYCARWDR | |
| | | GSRPHYYYYGMDVWGQGTTVTVSS | |
| | HCDR1 | SDYWS | 650 |
| | HCDR2 | YMYYSGSTNYNPSLKS | 88 |
| | HCDR3 | WDRGSRPHYYYYGMDV | 651 |
| | HFR1 | QVQLQESGPGLVKPSETLSLTCTVS | 24 |
| | | GGSIS | |
| | HFR2 | WIRQPPGKGLEWIG | 7 |
| | HFR3 | RVTISVDTSKNQFSLKLSSVTAADT | 115 |
| | | AVYYCAR | |
| | HFR4 | WGQGTTVTVSS | 147 |
| | LC | DIVMTQSPLSLPVTPGEPASISCRS | 652 |
| | | SQSLLHSNGYNYLDWYLQKPGQSPQ | |
| | | LLIYLGSNRASGVPDRFSGSASGTD | |
| | | FTLKISRVEAEDVGVYYCMQALQAF | |
| | | TFGPGTKVDIKRTVAAPSVFIFPPS | |
| | | DEQLKSGTASVVCLLNNFYPREAKV | |
| | | QWKVDNALQSGNSQESVTEQDSKDS | |
| | | TYSLSSTLTLSKADYE | |
| | LC | DIVMTQSPLSLPVTPGEPASISCRS | 653 |
| | variable | SQSLLHSNGYNYLDWYLQKPGQSPQ | |
| | | LLIYLGSNRASGVPDRFSGSASGTD | |
| | | FTLKISRVEAEDVGVYYCMQALQAF | |
| | | TFGPGTKVDIK | |
| | LCDR1 | RSSQSLLHSNGYNYLD | 262 |
| | LCDR2 | LGSNRAS | 263 |
| | LCDR3 | MQALQAFT | 654 |
| | LFR1 | DIVMTQSPLSLPVTPGEPASISC | 265 |
| | LFR2 | WYLQKPGQSPQLLIY | 266 |
| | LFR3 | GVPDRFSGSASGTDFTLKISRVEAE | 655 |
| | | DVGVYYC | |
| | LFR4 | FGPGTKVDIK | 443 |
| S144-509 | HC | EVQLVQSGAEVKKPGESLKISCKGS | 656 |
| | | AYTFTTYWIGWVRQMPGKGLEWMGI | |
| | | IYPGDSDTRYSPSFQGQVTISADKS | |
| | | ISTAYLQWSSLKASDTAMYYCARLL | |
| | | LVAGPFDYWGQGTLVTVSSASTKGP | |
| | | SVFPLAPSSKSTSGGTAALGCLVKD | |
| | | YFPEPVTVSWNSGALTSGVHTFPAV | |
| | | LQSSGLYSLSSVVTVPSSSLGTQTY | |
| | | ICNVNHKPSNTKVD | |
| | HC | EVQLVQSGAEVKKPGESLKISCKGS | 657 |
| | variable | AYTFTTYWIGWVRQMPGKGLEWMGI | |
| | | IYPGDSDTRYSPSFQGQVTISADKS | |
| | | ISTAYLQWSSLKASDTAMYYCARLL | |
| | | LVAGPFDYWGQGTLVTVSS | |
| | HCDR1 | TYWIG | 658 |
| | HCDR2 | IIYPGDSDTRYSPSFQG | 543 |
| | HCDR3 | LLLVAGPFDY | 659 |
| | HFR1 | EVQLVQSGAEVKKPGESLKISCKGS | 660 |
| | | AYTFT | |
| | HFR2 | WVRQMPGKGLEWMG | 174 |
| | HFR3 | QVTISADKSISTAYLQWSSLKASDT | 661 |
| | | AMYYCAR | |
| | HFR4 | WGQGTLVTVSS | 60 |
| | LC | DIQMTQSPSTLSASVGDRVTITCRA | 662 |
| | | SQSISSWLAWYQQKPGKAPNLLIYD | |
| | | ASSLESGVPSRFSGSGSGTEFTLTI | |
| | | SSLQPDDFATYYCQQYNSYPWTFGQ | |
| | | GTKVEIKRTVAAPSVFIFPPSDEQL | |
| | | KSGTASVVCLLNNFYPREAKVQWKV | |
| | | DN | |
| | LC | DIQMTQSPSTLSASVGDRVTITCRA | 663 |
| | variable | SQSISSWLAWYQQKPGKAPNLLIYD | |
| | | ASSLESGVPSRFSGSGSGTEFTLTI | |
| | | SSLQPDDFATYYCQQYNSYPWTFGQ | |
| | | GTKVEIK | |
| | LCDR1 | RASQSISSWLA | 520 |
| | LCDR2 | DASSLES | 387 |
| | LCDR3 | QQYNSYPWT | 646 |
| | LFR1 | DIQMTQSPSTLSASVGDRVTITC | 523 |
| | LFR2 | WYQQKPGKAPNLLIY | 664 |
| | LFR3 | GVPSRFSGSGSGTEFTLTISSLQPD | 524 |
| | | DFATYYC | |
| | LFR4 | FGQGTKVEIK | 53 |
| S144-516 | HC | QVQLLQSGAEVKKPGASVKVSCKAS | 665 |
| | | GYTFTGYYMHWVRQAPGQGLEWMGR | |
| | | INPNSGGTNYAQKFQGRVTMTRDTS | |
| | | ISTAYMELSRLTSDDTAVYYCATKT | |
| | | GIDRYYYYYMDVWGKGTTVTVSSAS | |
| | | TKGPSVFPLAPSSKSTSGGTAALGC | |
| | | LVKDYFPEPVTVSWNSGALTSGVHT | |
| | | FPAVLQSSG | |
| | HC | QVQLLQSGAEVKKPGASVKVSCKAS | 666 |
| | variable | GYTFTGYYMHWVRQAPGQGLEWMGR | |
| | | INPNSGGTNYAQKFQGRVTMTRDTS | |
| | | ISTAYMELSRLTSDDTAVYYCATKT | |
| | | GIDRYYYYYMDVWGKGTTVTVSS | |
| | HCDR1 | GYYMH | 187 |
| | HCDR2 | RINPNSGGTNYAQKFQG | 585 |
| | HCDR3 | KTGIDRYYYYYMDV | 667 |
| | HFR1 | QVQLLQSGAEVKKPGASVKVSCKAS | 668 |
| | | GYTFT | |
| | HFR2 | WVRQAPGQGLEWMG | 160 |
| | HFR3 | RVTMTRDTSISTAYMELSRLTSDDT | 669 |
| | | AVYYCAT | |
| | HFR4 | WGKGTTVTVSS | 670 |
| | LC | QSVLTQPPSVSEAPGQRVTISCTGS | 671 |
| | | SSNIGAGYDVHWYQQLPGTAPKLLI | |
| | | YGNINRPSGVPDRFSGSKSGTSASL | |
| | | AITGLQAEDEADYYCQSYDNSLNGS | |
| | | VFGGGTKLTVLRQPKAAPSVTLFPP | |
| | | SSEELQANKATLVCLISDFYPGAVT | |
| | | VAWKADSSPVKAGVETTTPSKQSNN | |
| | | KYAASS | |
| | LC | QSVLTQPPSVSEAPGQRVTISCTGS | 672 |
| | variable | SSNIGAGYDVHWYQQLPGTAPKLLI | |
| | | YGNINRPSGVPDRFSGSKSGTSASL | |
| | | AITGLQAEDEADYYCQSYDNSLNGS | |
| | | VFGGGTKLTVL | |
| | LCDR1 | TGSSSNIGAGYDVH | 673 |
| | LCDR2 | GNINRPS | 674 |
| | LCDR3 | QSYDNSLNGSV | 675 |
| | LFR1 | QSVLTQPPSVSEAPGQRVTISC | 676 |
| | LFR2 | WYQQLPGTAPKLLIY | 122 |
| | LFR3 | GVPDRFSGSKSGTSASLAITGLQAE | 539 |
| | | DEADYYC | |
| | LFR4 | FGGGTKLTVL | 69 |
| S144-568 | HC | QVQLQESGPGLVKPSETLSLTCSVS | 677 |
| | | GGSISDYYWSWIRQPPGKGLEWIGY | |
| | | IYNSGSTNYNPSLKSRVTISADPSK | |
| | | NQFSLKLSSVTAADTAVYYCARPHG | |
| | | GDYAFDIWGQGTMVTVSSASPTSPK | |
| | | VFPLSLDSTPQDGNVVVACLVQGFF | |
| | | PQEPLSVTWSESGQNVTARNF | |
| | HC | QVQLQESGPGLVKPSETLSLTCSVS | 678 |
| | variable | GGSISDYYWSWIRQPPGKGLEWIGY | |
| | | IYNSGSTNYNPSLKSRVTISADPSK | |
| | | NQFSLKLSSVTAADTAVYYCARPHG | |
| | | GDYAFDIWGQGTMVTVSS | |
| | HCDR1 | DYYWS | 679 |
| | HCDR2 | YIYNSGSTNYNPSLKS | 680 |
| | HCDR3 | PHGGDYAFDI | 681 |
| | HFR1 | QVQLQESGPGLVKPSETLSLTCSVS | 682 |
| | | GGSIS | |
| | HFR2 | WIRQPPGKGLEWIG | 7 |
| | HFR3 | RVTISADPSKNQFSLKLSSVTAADT | 683 |
| | | AVYYCAR | |
| | HFR4 | WGQGTMVTVSS | 44 |
| | LC | EIVLTQSPGTLSLSPGERATLSCRA | 684 |
| | | SQSVSSNFLAWYQQKPGQPPRLLIY | |
| | | GASVRATGIPDRFSGSGSGTDFTLT | |
| | | ITRLEPEDFAVYYCQQYGSLPRTFG | |
| | | QGTKVEIKRTVAAPSVFIFPPSDEQ | |
| | | LKSGTASVVCLLNNFYPREAKVQWK | |
| | | VDNALQSGNSQESVTEQDSKDSTYS | |
| | | LSSTLTLSKADYE | |
| | LC | EIVLTQSPGTLSLSPGERATLSCRA | 685 |
| | variable | SQSVSSNFLAWYQQKPGQPPRLLIY | |
| | | GASVRATGIPDRFSGSGSGTDFTLT | |
| | | ITRLEPEDFAVYYCQQYGSLPRTFG | |
| | | QGTKVEIK | |
| | LCDR1 | RASQSVSSNFLA | 686 |
| | LCDR2 | GASVRAT | 687 |
| | LCDR3 | QQYGSLPRT | 688 |
| | LFR1 | EIVLTQSPGTLSLSPGERATLSC | 50 |
| | LFR2 | WYQQKPGQPPRLLIY | 689 |
| | LFR3 | GIPDRFSGSGSGTDFTLTITRLEPE | 690 |
| | | DFAVYYC | |
| | LFR4 | FGQGTKVEIK | 53 |
| S144-576 | HC | QVQLVQSGAEVMKPGSSVKVSCKAS | 691 |
| | | GGTFSSYSITWVRQAPGQGLEWMGR | |
| | | IIPILGIANYAQKFQGRVTITADKS | |
| | | TSTAYMELSSLRSEDTAVYYCARGY | |
| | | SGSPSNLDGMDVWGQGTTVTVSSAS | |
| | | TKGPSVFPLAPSSKSTSGGTAALGC | |
| | | LVKDYFPEPVTVSWNSGALTSGVHT | |
| | | FPAVLQSSG | |
| | HC | QVQLVQSGAEVMKPGSSVKVSCKAS | 692 |
| | variable | GGTFSSYSITWVRQAPGQGLEWMGR | |
| | | IIPILGIANYAQKFQGRVTITADKS | |
| | | TSTAYMELSSLRSEDTAVYYCARGY | |
| | | SGSPSNLDGMDVWGQGTTVTVSS | |
| | HCDR1 | SYSIT | 693 |
| | HCDR2 | RIIPILGIANYAQKFQG | 157 |
| | HCDR3 | GYSGSPSNLDGMDV | 694 |
| | HFR1 | QVQLVQSGAEVMKPGSSVKVSCKAS | 695 |
| | | GGTFS | |
| | HFR2 | WVRQAPGQGLEWMG | 160 |
| | HFR3 | RVTITADKSTSTAYMELSSLRSEDT | 161 |
| | | AVYYCAR | |
| | HFR4 | WGQGTTVTVSS | 147 |
| | LC | IQMTQSPSTLSASVGDRVTITCRAS | 696 |
| | | QSISSWLAWYQQKPGKAPKLLIYDA | |
| | | SSLQSGVPSRFSGSGSGTEFTLTIS | |
| | | SLQPDDFATYYCQQYNSYSPITFGQ | |
| | | GTRLEIKRTVAAPSVFIFPPSDEQL | |
| | | KSGTASVVCLLNNFYPREAKVQWKV | |
| | | DNALQSGNSQESVTEQDSKDSTYSL | |
| | | SSTLTLSKADYE | |
| | LC | IQMTQSPSTLSASVGDRVTITCRAS | 697 |
| | variable | QSISSWLAWYQQKPGKAPKLLIYDA | |
| | | SSLQSGVPSRFSGSGSGTEFTLTIS | |
| | | SLQPDDFATYYCQQYNSYSPITFGQ | |
| | | GTRLEIK | |
| | LCDR1 | RASQSISSWLA | 520 |
| | LCDR2 | DASSLQS | 698 |
| | LCDR3 | QQYNSYSPIT | 699 |
| | LFR1 | IQMTQSPSTLSASVGDRVTITC | 700 |
| | LFR2 | WYQQKPGKAPKLLIY | 252 |
| | LFR3 | GVPSRFSGSGSGTEFTLTISSLQPD | 524 |
| | | DFATYYC | |
| | LFR4 | FGQGTRLEIK | 701 |
| S144-588 | HC | QLQLQESGPGLVKPSETLSLTCTVS | 702 |
| | | GGSISSSSYYWGWIRQPPGKGLEWI | |
| | | GSIYYSGSTYYNPSLKSRFTISVDT | |
| | | SKNQFSLKLSSVTAADTAVYYCAAY | |
| | | QRKLGYCRGNSCFSCFDPWGQGTLV | |
| | | TVSSASTKGPSVFPLAPSSKSTSGG | |
| | | TAALGCLVKDYFPEPVTVSWNSGAL | |
| | | TSGVHTFPAVLQSSG | |
| | HC | QLQLQESGPGLVKPSETLSLTCTVS | 703 |
| | variable | GGSISSSSYYWGWIRQPPGKGLEWI | |
| | | GSIYYSGSTYYNPSLKSRFTISVDT | |
| | | SKNQFSLKLSSVTAADTAVYYCAAY | |
| | | QRKLGYCRGNSCFSCFDPWGQGTLV | |
| | | TVSS | |
| | HCDR1 | SSSYYWG | 242 |
| | HCDR2 | SIYYSGSTYYNPSLKS | 243 |
| | HCDR3 | YQRKLGYCRGNSCFSCFDP | 704 |
| | HFR1 | QLQLQESGPGLVKPSETLSLTCTVS | 245 |
| | | GGSIS | |
| | HFR2 | WIRQPPGKGLEWIG | 7 |
| | HFR3 | RFTISVDTSKNQFSLKLSSVTAADT | 705 |
| | | AVYYCAA | |
| | HFR4 | WGQGTLVTVSS | 60 |
| | LC | SYELTQPPSVSVSPGQTASITCSGD | 706 |
| | | KLGDKYACWYQQKPGQSPVLVIYQD | |
| | | TKRPSGIPERFSGSNSGNTATLTIS | |
| | | GTQAMDEADYYCQAWDSSTVLFGGG | |
| | | TKLTVLGQPKAAPSVTLFPPSSEEL | |
| | | QANKATLVCLISDFYPGAVTVAWKA | |
| | | DSSPVKAGVETTTPSKQSNNKYAAS | |
| | | SYLSLTPEQWKSH | |
| | LC | SYELTQPPSVSVSPGQTASITCSGD | 707 |
| | variable | KLGDKYACWYQQKPGQSPVLVIYQD | |
| | | TKRPSGIPERFSGSNSGNTATLTIS | |
| | | GTQAMDEADYYCQAWDSSTVLFGGG | |
| | | TKLTVL | |
| | LCDR1 | SGDKLGDKYAC | 502 |
| | LCDR2 | QDTKRPS | 366 |
| | LCDR3 | QAWDSSTVL | 708 |
| | LFR1 | SYELTQPPSVSVSPGQTASITC | 368 |
| | LFR2 | WYQQKPGQSPVLVIY | 369 |
| | LFR3 | GIPERFSGSNSGNTATLTISGTQAM | 370 |
| | | DEADYYC | |
| | LFR4 | FGGGTKLTVL | 69 |
| S144-628 | HC | EVHLVQSGAEVKQPGESLKISCKGS | 709 |
| | | GYNFATYWIAWVRQMPGKGLEWMGI | |
| | | IYPGDSDTRYSPSFQGQVIISADKS | |
| | | IGTAFLQWSSLKASDTAMYYCARRG | |
| | | YSSSNYRVDEYYYYGMDVWGQGTTV | |
| | | TVSSASPTSPKVFPLSLCSTQPDGN | |
| | | VVIACLVQGFFPQEPLSVTWSESGQ | |
| | | GVTARNFP | |
| | HC | EVHLVQSGAEVKQPGESLKISCKGS | 710 |
| | variable | GYNFATYWIAWVRQMPGKGLEWMGI | |
| | | IYPGDSDTRYSPSFQGQVIISADKS | |
| | | IGTAFLQWSSLKASDTAMYYCARRG | |
| | | YSSSNYRVDEYYYYGMDVWGQGTTV | |
| | | TVSS | |
| | HCDR1 | TYWIA | 527 |
| | HCDR2 | IIYPGDSDTRYSPSFQG | 543 |
| | HCDR3 | RGYSSSNYRVDEYYYYGMDV | 711 |
| | HFR1 | EVHLVQSGAEVKQPGESLKISCKGS | 712 |
| | | GYNFA | |
| | HFR2 | WVRQMPGKGLEWMG | 174 |
| | HFR3 | QVIISADKSIGTAFLQWSSLKASDT | 713 |
| | | AMYYCAR | |
| | HFR4 | WGQGTTVTVSS | 147 |
| | LC | QSVLTQPPSMSGAPGQRVTISCTGS | 714 |
| | | SSNIGAGYDVHWYQQLPGAAPKLLI | |
| | | YGDTSRPSGVPDRFSGSKSDTSASL | |
| | | AITGLQAEDEADYYCQSFDRSLSGL | |
| | | VIFGGGTRLTVLGQPKAAPSVTLFP | |
| | | PSSEELQANKATLVCLISDFYPGAV | |
| | | TVAWKADSSPVKAGVETTTPSKQSN | |
| | | NKYAASS*DRKS | |
| | LC | QSVLTQPPSMSGAPGQRVTISCTGS | 715 |
| | variable | SSNIGAGYDVHWYQQLPGAAPKLLI | |
| | | YGDTSRPSGVPDRFSGSKSDTSASL | |
| | | AITGLQAEDEADYYCQSFDRSLSGL | |
| | | VIFGGGTRLTVL | |
| | LCDR1 | TGSSSNIGAGYDVH | 673 |
| | LCDR2 | GDTSRPS | 716 |
| | LCDR3 | QSFDRSLSGLVI | 717 |
| | LFR1 | QSVLTQPPSMSGAPGQRVTISC | 718 |
| | LFR2 | WYQQLPGAAPKLLIY | 719 |
| | LFR3 | GVPDRFSGSKSDTSASLAITGLQAE | 720 |
| | | DEADYYC | |
| | LFR4 | FGGGTRLTVL | 721 |
| S144-740 | HC | [sequence omitted] | 722 |
| | | GYTFTGYYMHWVRQAPGQGLEWMGR | |
| | | INPNSGDTNYAQKFQGRVTMTRDTS | |
| | | ISTAYMELSRLRSDDTAVYYCARLG | |
| | | KGMAAARTVFDSWGQGTLVTVSSAS | |
| | | TKGPSVFPLAPSSKSTSGGTAALGC | |
| | | LVKDYFPEPVTVSWNSGALTSGVHT | |
| | | FPAVLQSSG | |
| | HC | [sequence omitted] | 723 |
| | variable | GYTFTGYYMHWVRQAPGQGLEWMGR | |
| | | INPNSGDTNYAQKFQGRVTMTRDTS | |
| | | ISTAYMELSRLRSDDTAVYYCARLG | |
| | | KGMAAARTVFDSWGQGTLVTVSS | |
| | HCDR1 | GYYMH | 187 |
| | HCDR2 | RINPNSGDTNYAQKFQG | 724 |
| | HCDR3 | LGKGMAAARTVFDS | 725 |
| | HFR1 | [sequence omitted] | 190 |
| | | GYTFT | |
| | HFR2 | WVRQAPGQGLEWMG | 160 |
| | HFR3 | RVTMTRDTSISTAYMELSRLRSDDT | 588 |
| | | AVYYCAR | |
| | HFR4 | WGQGTLVTVSS | 60 |
| | LC | EVVLTQSPGTLSLSPGERATLSCRA | 726 |
| | | SQSVSSSYLAWYQQKPGQAPRLVIY | |
| | | GASSRATGIPDRFSGSGSGTDFTLT | |
| | | ISRLEPEDFAVYYCQQFGSSPTFGR | |
| | | GTRLEIKRTVAAPSVFIFPPSDEQL | |
| | | KSGTASVVCLLNNFYPREAKVQWKV | |
| | | DNALQSGNSQESVTEQDSKDSTYSL | |
| | | SSTLTLSKADYE | |
| | LC | EVVLTQSPGTLSLSPGERATLSCRA | 727 |
| | variable | SQSVSSSYLAWYQQKPGQAPRLVIY | |
| | | GASSRATGIPDRFSGSGSGTDFTLT | |
| | | ISRLEPEDFAVYYCQQFGSSPTFGR | |
| | | GTRLEIK | |
| | LCDR1 | RASQSVSSSYLA | 338 |
| | LCDR2 | GASSRAT | 135 |
| | LCDR3 | QQFGSSPT | 728 |
| | LFR1 | EVVLTQSPGTLSLSPGERATLSC | 729 |
| | LFR2 | WYQQKPGQAPRLVIY | 730 |
| | LFR3 | GIPDRFSGSGSGTDFTLTISRLEPE | 196 |
| | | DFAVYYC | |
| | LFR4 | FGRGTRLEIK | 731 |
| S144-741 | HC | QVHLVQSGAEVKKPGASVKVSCKAS | 732 |
| | | GYTFTGYYMNWVRQAPGQGLEWMGR | |
| | | INPNSGGTNYAQKFQGRVTMTRDTS | |
| | | ISTAYMELSRLRSDDAAVYYCARAE | |
| | | RYSSSWYNLYYWGQGTLVTVSSAST | |
| | | KGPSVFPLAPSSKSTSGGTAALGCL | |
| | | VKDYFPEPVTVSWNSGALTSGVHTF | |
| | | PAVLQSSG | |
| | HC | QVHLVQSGAEVKKPGASVKVSCKAS | 733 |
| | variable | GYTFTGYYMNWVRQAPGQGLEWMGR | |
| | | INPNSGGTNYAQKFQGRVTMTRDTS | |
| | | ISTAYMELSRLRSDDAAVYYCARAE | |
| | | RYSSSWYNLYYWGQGTLVTVSS | |
| | HCDR1 | GYYMN | 734 |
| | HCDR2 | RINPNSGGTNYAQKFQG | 585 |
| | HCDR3 | AERYSSSWYNLYY | 735 |
| | HFR1 | QVHLVQSGAEVKKPGASVKVSCKAS | 736 |
| | | GYTFT | |
| | HFR2 | WVRQAPGQGLEWMG | 160 |
| | HFR3 | RVTMTRDTSISTAYMELSRLRSDDA | 737 |
| | | AVYYCAR | |
| | HFR4 | WGQGTLVTVSS | 60 |
| | LC | QSVLTQPPSASGTPGQRVTISCSGS | 738 |
| | | SSNIGSNTVNWYQQLPGTAPKLLIY | |
| | | SNNQRPSGVPDRFSGSKSGTSASLA | |
| | | ISGLQSEDEADYYCAAWDDSLNGVV | |
| | | FGGGTKLTVLGQPKAAPSVTLFPPS | |
| | | SEELQANKATLVCLISDFYPGAVTV | |
| | | AWKADSSPVKAGVETTTPSKQSNNK | |
| | | YAASSYLSLTPEQWKSH | |
| | LC | QSVLTQPPSASGTPGQRVTISCSGS | 739 |
| | variable | SSNIGSNTVNWYQQLPGTAPKLLIY | |
| | | SNNQRPSGVPDRFSGSKSGTSASLA | |
| | | ISGLQSEDEADYYCAAWDDSLNGVV | |
| | | FGGGTKLTVL | |
| | LCDR1 | SGSSSNIGSNTVN | 740 |
| | LCDR2 | SNNQRPS | 119 |
| | LCDR3 | AAWDDSLNGVV | 741 |
| | LFR1 | QSVLTQPPSASGTPGQRVTISC | 121 |
| | LFR2 | WYQQLPGTAPKLLIY | 122 |
| | LFR3 | GVPDRFSGSKSGTSASLAISGLQSE | 123 |
| | | DEADYYC | |
| | LFR4 | FGGGTKLTVL | 69 |
| S144-803 | HC | EVQLVQSGAEVKKPGESLKISCKGS | 742 |
| | | RYSFTRYWIAWVRQMPGKGLEWMGI | |
| | | IYPGDSDTRYSPSFQGPVTISADKS | |
| | | ISTAYLQWSSLKASDTAIYYCARLP | |
| | | NSNYVDYWGQGTLVTVSSASTKGPS | |
| | | VFPLAPSSKSTSGGTAALGCLVKDY | |
| | | FPEPVTVSWNSGALTSGVHTFPAVL | |
| | | QSSGLYSLSSVVTVPSSSLGTQTYI | |
| | | CNVNHKPSNTKVD | |
| | HC | EVQLVQSGAEVKKPGESLKISCKGS | 743 |
| | variable | RYSFTRYWIAWVRQMPGKGLEWMGI | |
| | | IYPGDSDTRYSPSFQGPVTISADKS | |
| | | ISTAYLQWSSLKASDTAIYYCARLP | |
| | | NSNYVDYWGQGTLVTVSS | |
| | HCDR1 | RYWIA | 744 |
| | HCDR2 | IIYPGDSDTRYSPSFQG | 543 |
| | HCDR3 | LPNSNYVDY | 745 |
| | HFR1 | EVQLVQSGAEVKKPGESLKISCKGS | 746 |
| | | RYSFT | |
| | HFR2 | WVRQMPGKGLEWMG | 174 |
| | HFR3 | PVTISADKSISTAYLQWSSLKASDT | 747 |
| | | AIYYCAR | |
| | HFR4 | WGQGTLVTVSS | 60 |
| | LC | DIQMTQSPSTLSASVGDRVTITCRA | 748 |
| | | SQSISSWLAWYQQKPGKAPKLLIYD | |
| | | ASSLESGVPSRFSGSGSGTEFTLTI | |
| | | SSLQPDDFATYYCQQYNIYPYTFGQ | |
| | | GTKLDIKRTVAAPSVFIFPPSDEQL | |
| | | KSGTASVVCLLNNFYPREAKVQWKV | |
| | | DNALQSGNSQESVTEQDSKDSTYSL | |
| | | SSTLTLSKADYE | |
| | LC | DIQMTQSPSTLSASVGDRVTITCRA | 749 |
| | variable | SQSISSWLAWYQQKPGKAPKLLIYD | |
| | | ASSLESGVPSRFSGSGSGTEFTLTI | |
| | | SSLQPDDFATYYCQQYNIYPYTFGQ | |
| | | GTKLDIK | |
| | LCDR1 | RASQSISSWLA | 520 |
| | LCDR2 | DASSLES | 387 |
| | LCDR3 | QQYNIYPYT | 750 |
| | LFR1 | DIQMTQSPSTLSASVGDRVTITC | 523 |
| | LFR2 | WYQQKPGKAPKLLIY | 252 |
| | LFR3 | GVPSRFSGSGSGTEFTLTISSLQPD | 524 |
| | | DFATYYC | |
| | LFR4 | FGQGTKLDIK | 751 |
| S144-843 | HC | QVQLVESGGGVVQPGGSVRLSCAAS | 752 |
| | | GFDFTNNGMYWVRQAPGKGLEWVAF | |
| | | IRYDGNKQDYADSVKGRFTISRDNS | |
| | | KNTLYLQMSSLRPEDTAVYYCAKGV | |
| | | YTENYGWGQGTLVTVSSGTTVTVSS | |
| | | ASTKGPSVFPLAPCSRSTSESTAAL | |
| | | GCLVKDYFPEPVTVSWNSGALTSGV | |
| | | HTFPAVLQSSGLYSLSSVVTVPSSN | |
| | | FGTQTYTCNVDHKPSNTKVD | |
| | HC | QVQLVESGGGVVQPGGSVRLSCAAS | 753 |
| | variable | GFDFTNNGMYWVRQAPGKGLEWVAF | |
| | | IRYDGNKQDYADSVKGRFTISRDNS | |
| | | KNTLYLQMSSLRPEDTAVYYCAKGV | |
| | | YTENYGWGQGTLVTVSS | |
| | HCDR1 | NNGMY | 754 |
| | HCDR2 | FIRYDGNKQDYADSVKG | 755 |
| | HCDR3 | GVYTENYG | 756 |
| | HFR1 | QVQLVESGGGVVQPGGSVRLSCAAS | 757 |
| | | GFDFT | |
| | HFR2 | WVRQAPGKGLEWVA | 145 |
| | HFR3 | RFTISRDNSKNTLYLQMSSLRPEDT | 758 |
| | | AVYYCAK | |
| | HFR4 | WGQGTLVTVSS | 60 |
| | LC | EIVLTQSPGTLSLSPGERATLSCRA | 759 |
| | | SQTVTSRYLAWYQQKPGQAPRLLIY | |
| | | GASTRATGIPDRFSGSGSGTDFTLT | |
| | | ISRLEPEDFAVYYCQQYGNSPPYTF | |
| | | GQGTKLEIKRTVAAPSVFIFPPSDE | |
| | | QLKSGTASVVCLLNNFYPREAKVQW | |
| | | KVDNALQSGNSQESVTEQDSKDSTY | |
| | | SLSSTLTLSKADYE | |
| | LC | EIVLTQSPGTLSLSPGERATLSCRA | 760 |
| | variable | SQTVTSRYLAWYQQKPGQAPRLLIY | |
| | | GASTRATGIPDRFSGSGSGTDFTLT | |
| | | ISRLEPEDFAVYYCQQYGNSPPYTF | |
| | | GQGTKLEIK | |
| | LCDR1 | RASQTVTSRYLA | 761 |
| | LCDR2 | GASTRAT | 208 |
| | LCDR3 | QQYGNSPPYT | 762 |
| | LFR1 | EIVLTQSPGTLSLSPGERATLSC | 50 |
| | LFR2 | WYQQKPGQAPRLLIY | 182 |
| | LFR3 | GIPDRFSGSGSGTDFTLTISRLEPE | 196 |
| | | DFAVYYC | |
| | LFR4 | FGQGTKLEIK | 380 |
| S144-877 | HC | QVQLVESGGGVVQPGRSLRLSCAAS | 763 |
| | | GFTFSTYGMHWVRQAPGKGLEWVAV | |
| | | ISYDGSNKYYADSVKGRFTISRDNS | |
| | | KNTLYLQMNSLRAEDTAVYYCAKQQ | |
| | | GTYCSGGNCYSGYFDYWGQGTLVTV | |
| | | SSASTKGPSVFPLAPSSKSTSGGTA | |
| | | ALGCLVKDYFPEPVTVSWNSGALTS | |
| | | GVHTFPAVLQSSGLYSLSSVVTVPS | |
| | | SSLGTQTYIC | |
| | HC | QVQLVESGGGVVQPGRSLRLSCAAS | 764 |
| | variable | GFTFSTYGMHWVRQAPGKGLEWVAV | |
| | | ISYDGSNKYYADSVKGRFTISRDNS | |
| | | KNTLYLQMNSLRAEDTAVYYCAKQQ | |
| | | GTYCSGGNCYSGYFDYWGQGTLVTV | |
| | | SS | |
| | HCDR1 | TYGMH | 765 |
| | HCDR2 | VISYDGSNKYYADSVKG | 497 |
| | HCDR3 | QQGTYCSGGNCYSGYFDY | 766 |
| | HFR1 | QVQLVESGGGVVQPGRSLRLSCAAS | 144 |
| | | GFTFS | |
| | HFR2 | WVRQAPGKGLEWVA | 145 |
| | HFR3 | RFTISRDNSKNTLYLQMNSLRAEDT | 499 |
| | | AVYYCAK | |
| | HFR4 | WGQGTLVTVSS | 60 |
| | LC | DIQMTQSPSSLSASVGDRVTITCQA | 767 |
| | | SQDISNYLNWYQQKPGKAPKLLIYD | |
| | | ASNLETGVPSRFSGSGSGTDFSFSI | |
| | | SSLQPEDIATYYCQQYDNVPLTFGG | |
| | | GTKVEIKRTVAAPSVFIFPPSDEQL | |
| | | KSGTASVVCLLNNFYPREAKVQWKV | |
| | | DNALQSGNSQESVTEQDSKDSTYSL | |
| | | SSTLTLSKADYE | |
| | LC | DIQMTQSPSSLSASVGDRVTITCQA | 768 |
| | variable | SQDISNYLNWYQQKPGKAPKLLIYD | |
| | | ASNLETGVPSRFSGSGSGTDFSFSI | |
| | | SSLQPEDIATYYCQQYDNVPLTFGG | |
| | | GTKVEIK | |
| | LCDR1 | QASQDISNYLN | 769 |
| | LCDR2 | DASNLET | 770 |
| | LCDR3 | QQYDNVPLT | 771 |
| | LFR1 | DIQMTQSPSSLSASVGDRVTITC | 251 |
| | LFR2 | WYQQKPGKAPKLLIY | 252 |
| | LFR3 | GVPSRFSGSGSGTDFSFSISSLQPE | 772 |
| | | DIATYYC | |
| | LFR4 | FGGGTKVEIK | 85 |
| S144-952 | HC | QVQLVQSGAEVKKPGASVKVSCTAS | 773 |
| | | GYTVTSYGISWVRQAPGQGLEWMGW | |
| | | ISTYNGNTNYAQKLQGRVTMTTDTS | |
| | | TSTAYMELRSLRSDDTAVYYCARE | |
| | | YSYGYRLAYFDYWGQGTLVTVSSGS | |
| | | ASAPTLFPLVSCENSPSDTSSVAVG | |
| | | CLAQDFLPDSITFSWKYKNNSDISS | |
| | | TRGFPSVLRGGKYAATSQVLLPSKD | |
| | | VM | |
| | HC | QVQLVQSGAEVKKPGASVKVSCTAS | 774 |
| | variable | GYTVTSYGISWVRQAPGQGLEWMGW | |
| | | ISTYNGNTNYAQKLQGRVTMTTDTS | |
| | | TSTAYMELRSLRSDDTAVYYCAREY | |
| | | SYGYRLAYFDYWGQGTLVTVSS | |
| | HCDR1 | SYGIS | 775 |
| | HCDR2 | WISTYNGNTNYAQKLQG | 776 |
| | HCDR3 | EYSYGYRLAYFDY | 777 |
| | HFR1 | QVQLVQSGAEVKKPGASVKVSCTAS | 778 |
| | | GYTVT | |
| | HFR2 | WVRQAPGQGLEWMG | 160 |
| | HFR3 | RVTMTTDTSTSTAYMELRSLRSDDT | 779 |
| | | AVYYCAR | |
| | HFR4 | WGQGTLVTVSS | 60 |
| | LC | DIVMTQSPDSLAVSLGERATINCKS | 780 |
| | | SQSVLNSSNNKNYLAWYQQKPGQPP | |
| | | KLLIYWASTRESGVPDRFSGSGSGT | |
| | | DFTLTISSLQAEDVAVYYCQQYYST | |
| | | PQTFGQGTKVEIKRTVAAPSVFIFP | |
| | | PSDEQLKSGTASVVCLLNNFYPREA | |
| | | KVQWKVDNALQSGNSQESVTEQDSK | |
| | | DSTYSLSSTLTLSKADYE | |
| | LC | DIVMTQSPDSLAVSLGERATINCKS | 781 |
| | variable | SQSVLNSSNNKNYLAWYQQKPGQPP | |
| | | KLLIYWASTRESGVPDRFSGSGSGT | |
| | | DFTLTISSLQAEDVAVYYCQQYYST | |
| | | PQTFGQGTKVEIK | |
| | LCDR1 | KSSQSVLNSSNNKNYLA | 782 |
| | LCDR2 | WASTRES | 30 |
| | LCDR3 | QQYYSTPQT | 783 |
| | LFR1 | DIVMTQSPDSLAVSLGERATINC | 32 |
| | LFR2 | WYQQKPGQPPKLLIY | 33 |
| | LFR3 | GVPDRFSGSGSGTDFTLTISSLQAE | 293 |
| | | DVAVYYC | |
| | LFR4 | FGQGTKVEIK | 53 |
| S144-971 | HC | EVQLVESGGGLVQPGGSLRISCSAS | 784 |
| | | GFTFSRYAMHWVRQAPGKGLEYVSA | |
| | | IRSNGGSTYYADSVRGRFTISRDNS | |
| | | RNTLYLQMSSLRAEDTAVYYCVIIN | |
| | | NLAAAGTRFDYWGQGTLVTVSSAST | |
| | | KGPSVFPLAPSSKSTSGGTAALGCL | |
| | | VKDYFPEPVTVSWNSGALTSGVHTF | |
| | | PAVLQSSG | |
| | HC | EVQLVESGGGLVQPGGSLRISCSAS | 785 |
| | variable | GFTFSRYAMHWVRQAPGKGLEYVSA | |
| | | IRSNGGSTYYADSVRGRFTISRDNS | |
| | | RNTLYLQMSSLRAEDTAVYYCVIIN | |
| | | NLAAAGTRFDYWGQGTLVTVSS | |
| | HCDR1 | RYAMH | 786 |
| | HCDR2 | AIRSNGGSTYYADSVRG | 787 |
| | HCDR3 | INNLAAAGTRFDY | 788 |
| | HFR1 | EVQLVESGGGLVQPGGSLRISCSAS | 789 |
| | | GFTFS | |
| | HFR2 | WVRQAPGKGLEYVS | 790 |
| | HFR3 | RFTISRDNSRNTLYLQMSSLRAEDT | 791 |
| | | AVYYCVI | |
| | HFR4 | WGQGTLVTVSS | 60 |
| | LC | DIVMTQSPDSLAVSLGERATINCKS | 792 |
| | | SQSVLYSSNNKNFLTWYQQKPGQPP | |
| | | KLLIYWASTRESGVPDRFSGSGSGT | |
| | | DFTLTISSLQAEDVAVYYCQQYYTT | |
| | | PWTFGQGTKVEIKRTVAAPSVFIFP | |
| | | PSDEQLKSGTASVVCLLNNFYPREA | |
| | | KVQWKVDNALQSGNSQESVTEQDSK | |
| | | DSTYSLSSTLTLSKADYE | |
| | LC | DIVMTQSPDSLAVSLGERATINCKS | 793 |
| | variable | SQSVLYSSNNKNFLTWYQQKPGQPP | |
| | | KLLIYWASTRESGVPDRFSGSGSGT | |
| | | DFTLTISSLQAEDVAVYYCQQYYTT | |
| | | PWTFGQGTKVEIK | |
| | LCDR1 | KSSQSVLYSSNNKNFLT | 794 |
| | LCDR2 | WASTRES | 30 |
| | LCDR3 | QQYYTTPWT | 795 |
| | LFR1 | DIVMTQSPDSLAVSLGERATINC | 32 |
| | LFR2 | WYQQKPGQPPKLLIY | 33 |
| | LFR3 | GVPDRFSGSGSGTDFTLTISSLQAE | 293 |
| | | DVAVYYC | |
| | LFR4 | FGQGTKVEIK | 53 |
| S144- | HC | [sequence omitted] | 796 |
| 1036 | | GGSFSGYFWSWIRQPPGKGLEWIGE | |
| | | INHSGSTNYNPSLKSRVTISVDTSK | |
| | | NQFSLKLSSVTAADTAVYYCARAPY | |
| | | YDFLREGNWFDPWGQGTLVTVSSAS | |
| | | TKGPSVFPLAPSSKSTSGGTAALGC | |
| | | LVKDYFPEPVTVSWNSGALTSGVHT | |
| | | FPAVLQSSGLYSLSSVVTVPSSSLG | |
| | | TQTYICNVNHKPS | |
| | HC | [sequence omitted] | 797 |
| | variable | GGSFSGYFWSWIRQPPGKGLEWIGE | |
| | | INHSGSTNYNPSLKSRVTISVDTSK | |
| | | NQFSLKLSSVTAADTAVYYCARAPY | |
| | | YDFLREGNWFDPWGQGTLVTVSS | |
| | HCDR1 | GYFWS | 798 |
| | HCDR2 | EINHSGSTNYNPSLKS | 799 |
| | HCDR3 | APYYDFLREGNWFDP | 800 |
| | HFR1 | [sequence omitted] | 801 |
| | | GGSFS | |
| | HFR2 | WIRQPPGKGLEWIG | 7 |
| | HFR3 | RVTISVDTSKNQFSLKLSSVTAADT | 115 |
| | | AVYYCAR | |
| | HFR4 | WGQGTLVTVSS | 60 |
| | LC | DIVMTQSPDSLAVSLGERATINCNS | 802 |
| | | SQSVLYSSINKNYLAWYQQKPAQPP | |
| | | KVLIYWASTRESGVPDRFSGSGSGT | |
| | | DFTLTISSLQAEDVAVYYCQQYYRT | |
| | | PWTFGQGTKVEIKRTVAAPSVFIFP | |
| | | PSDEQLKSGTASVVCLLNNFYPREA | |
| | | KVQWKVDNALQSGNSQESVTEQDSK | |
| | | DSTYSLSSTLTLSKADYE | |
| | LC | DIVMTQSPDSLAVSLGERATINCNS | 803 |
| | variable | SQSVLYSSINKNYLAWYQQKPAQPP | |
| | | KVLIYWASTRESGVPDRFSGSGSGT | |
| | | DFTLTISSLQAEDVAVYYCQQYYRT | |
| | | PWTFGQGTKVEIK | |
| | LCDR1 | NSSQSVLYSSINKNYLA | 804 |
| | LCDR2 | WASTRES | 30 |
| | LCDR3 | QQYYRTPWT | 805 |
| | LFR1 | DIVMTQSPDSLAVSLGERATINC | 32 |
| | LFR2 | WYQQKPAQPPKVLIY | 806 |
| | LFR3 | GVPDRFSGSGSGTDFTLTISSLQAE | 293 |
| | | DVAVYYC | |
| | LFR4 | FGQGTKVEIK | 53 |
| S144- | HC | [sequence omitted] | 807 |
| 1079 | | GDTFGSYSITWVRQAPGQGLEWMGR | |
| | | IIPVLGIANYAQKFQGRVTITADKS | |
| | | TSTAYMELSSLRSEDTAVYYCAGGG | |
| | | CSGGNCYSWYNWFDPWGQGSLVTVS | |
| | | SASTKGPSVFPLAPSSKSTSGGTAA | |
| | | LGCLVKDYFPEPVTVSWNSGALTSG | |
| | | VHTFPAVLQSSG | |
| | HC | [sequence omitted] | 808 |
| | variable | GDTFGSYSITWVRQAPGQGLEWMGR | |
| | | IIPVLGIANYAQKFQGRVTITADKS | |
| | | TSTAYMELSSLRSEDTAVYYCAGGG | |
| | | CSGGNCYSWYNWFDPWGQGSLVTVS | |
| | | S | |
| | HCDR1 | SYSIT | 693 |
| | HCDR2 | RIIPVLGIANYAQKFQG | 809 |
| | HCDR3 | GGCSGGNCYSWYNWFDP | 810 |
| | HFR1 | [sequence omitted] | 811 |
| | | GDTFG | |
| | HFR2 | WVRQAPGQGLEWMG | 160 |
| | HFR3 | RVTITADKSTSTAYMELSSLRSEDT | 812 |
| | | AVYYCAG | |
| | HFR4 | WGQGSLVTVSS | 813 |
| | LC | EIVLTQSPGTLSLSPGERATLSCRA | 814 |
| | | SQSVSSNYLAWYQQKPGQAPRLLIY | |
| | | GASSRATGIPERFSGSGSGTDFTLT | |
| | | ISRLEPEDFAVYYCQQYGRSPYTFG | |
| | | QGTKLEIKRTVAAPSVFIFPPSDEQ | |
| | | LKSGTASVVCLLNNFYPREAKVQWK | |
| | | VDNALQSGNSQESVTEQDSKDSTYS | |
| | | LSSTLTLSKADYE | |
| | LC | EIVLTQSPGTLSLSPGERATLSCRA | 815 |
| | variable | SQSVSSNYLAWYQQKPGQAPRLLIY | |
| | | GASSRATGIPERFSGSGSGTDFTLT | |
| | | ISRLEPEDFAVYYCQQYGRSPYTFG | |
| | | QGTKLEIK | |
| | LCDR1 | RASQSVSSNYLA | 816 |
| | LCDR2 | GASSRAT | 135 |
| | LCDR3 | QQYGRSPYT | 817 |
| | LFR1 | EIVLTQSPGTLSLSPGERATLSC | 50 |
| | LFR2 | WYQQKPGQAPRLLIY | 182 |
| | LFR3 | GIPERFSGSGSGTDFTLTISRLEPE | 818 |
| | | DFAVYYC | |
| | LFR4 | FGQGTKLEIK | 380 |
| 825S144- | HC | QVQLQESGPGLVKPSETLSLTCTVS | 819 |
| 1299 | | GGSISSYYWSWIRQPPGKGLEWIGY | |
| | | INYRGITNYNPSLKSRVTISVDMSK | |
| | | NQFSLKLSSVTAADTAVYSCARLAV | |
| | | ASRGTVDYWGQGTLVTVSSASTKGP | |
| | | SVFPLAPSSKSTSGGTAALGCLVKD | |
| | | YFPEPVTVSWNSGALTSGVHTFPAV | |
| | | LQSSGLYSLSSVVTVPSSNFGTQTY | |
| | | TCNVDHKPSNTKVD | |
| | HC | QVQLQESGPGLVKPSETLSLTCTVS | 820 |
| | variable | GGSISSYYWSWIRQPPGKGLEWIGY | |
| | | INYRGITNYNPSLKSRVTISVDMSK | |
| | | NQFSLKLSSVTAADTAVYSCARLAV | |
| | | ASRGTVDYWGQGTLVTVSS | |
| | HCDR1 | SYYWS | 56 |
| | HCDR2 | YINYRGITNYNPSLKS | 821 |
| | HCDR3 | LAVASRGTVDY | 822 |
| | HFR1 | QVQLQESGPGLVKPSETLSLTCTVS | 24 |
| | | GGSIS | |
| | HFR2 | WIRQPPGKGLEWIG | 7 |
| | HFR3 | RVTISVDMSKNQFSLKLSSVTAADT | 823 |
| | | AVYSCAR | |
| | HFR4 | WGQGTLVTVSS | 60 |
| | LC | QSVLTQPPSASGTPGQRVTISCSGS | 824 |
| | | SSNIGSNYVYWYQQLPGTAPKLLIY | |
| | | RNNQRPSGVPDRFSGSKSGTSASLA | |
| | | ISGLRSEDEADYYCAAWDDSLSVNV | |
| | | VFGGGTKLTVLGQPKAAPSVTLFPP | |
| | | SSEELQANKATLVCLISDFYPGAVT | |
| | | VAWKADSSPVKAGVETTKPSKQSNN | |
| | | KYAASSYLSLTPEQWKSH | |
| | LC | QSVLTQPPSASGTPGQRVTISCSGS | 825 |
| | variable | SSNIGSNYVYWYQQLPGTAPKLLIY | |
| | | RNNQRPSGVPDRFSGSKSGTSASLA | |
| | | ISGLRSEDEADYYCAAWDDSLSVNV | |
| | | VFGGGTKLTVL | |
| | LCDR1 | SGSSSNIGSNYVY | 403 |
| | LCDR2 | RNNQRPS | 404 |
| | LCDR3 | AAWDDSLSVNVV | 826 |
| | LFR1 | QSVLTQPPSASGTPGQRVTISC | 121 |
| | LFR2 | WYQQLPGTAPKLLIY | 122 |
| | LFR3 | GVPDRFSGSKSGTSASLAISGLRSE | 406 |
| | | DEADYYC | |
| | LFR4 | FGGGTKLTVL | 69 |
| S144- | HC | QVQLVQSGTEVKKPGASVKVSCKAS | 827 |
| 1339 | | GYTFTDYYMHWVRQAPGQGLEWMGR | |
| | | INPTSGGTNYPQKFQGSVTMTRDTS | |
| | | LSTVYMELSGLRSDDTAVYYCARE | |
| | | RVTLIQGKNHYYMDVWGTGTTVTVS | |
| | | SASTKGPSVFPLAPSSKSTSGGTAA | |
| | | LGCLVKDYFPEPVTVSWNSGALTSG | |
| | | VHTFPAVLQSSG | |
| | HC | QVQLVQSGTEVKKPGASVKVSCKAS | 828 |
| | variable | GYTFTDYYMHWVRQAPGQGLEWMGR | |
| | | INPTSGGTNYPQKFQGSVTMTRDTS | |
| | | LSTVYMELSGLRSDDTAVYYCARER | |
| | | VTLIQGKNHYYMDVWGTGTTVTVSS | |
| | HCDR1 | DYYMH | 829 |
| | HCDR2 | RINPTSGGTNYPQKFQG | 830 |
| | HCDR3 | ERVTLIQGKNHYYMDV | 831 |
| | HFR1 | QVQLVQSGTEVKKPGASVKVSCKAS | 832 |
| | | GYTFT | |
| | HFR2 | WVRQAPGQGLEWMG | 160 |
| | HFR3 | SVTMTRDTSLSTVYMELSGLRSDDT | 833 |
| | | AVYYCAR | |
| | HFR4 | WGTGTTVTVSS | 834 |
| | LC | QSALTQPASVSGSPGQSITISCTGT | 835 |
| | | NSDVGGYNYVSWYQQHPGKAPRLMI | |
| | | YDVSNRPSGVSNRFSGSKSGNTASL | |
| | | TISGLQAEDEADYYCSSYTSSSTLV | |
| | | VFGGGTKLTVLGQPKAAPSVTLFPP | |
| | | SSEELQANKATLVCLISDFYPGAVT | |
| | | VAWKADSSPVKAGVETTTPSKQSNN | |
| | | KYAASSYLSLTPEQWKSH | |
| | LC | QSALTQPASVSGSPGQSITISCTGT | 836 |
| | variable | NSDVGGYNYVSWYQQHPGKAPRLMI | |
| | | YDVSNRPSGVSNRFSGSKSGNTASL | |
| | | TISGLQAEDEADYYCSSYTSSSTLV | |
| | | VFGGGTKLTVL | |
| | LCDR1 | TGTNSDVGGYNYVS | 837 |
| | LCDR2 | DVSNRPS | 64 |
| | LCDR3 | SSYTSSSTLVV | 838 |
| | LFR1 | QSALTQPASVSGSPGQSITISC | 66 |
| | LFR2 | WYQQHPGKAPRLMIY | 839 |
| | LFR3 | GVSNRFSGSKSGNTASLTISGLQAE | 68 |
| | | DEADYYC | |
| | LFR4 | FGGGTKLTVL | 69 |
| S144- | HC | [sequence omitted] | 840 |
| 1406 | | GYTFTTYAMHWVRQAPGQRLEWMGW | |
| | | INAGNGNTKYSQNFQGRVTITRDTS | |
| | | ASTAYMELSSLRSEDTAVYYCASLV | |
| | | GGDSSSWYDYMDVWGKGTTVTVSSA | |
| | | STKGPSVFPLAPCSRSTSESTAALG | |
| | | CLVKDYFPEPVTVSWNSGALTSGVH | |
| | | TFPAVLQSSGLYSLSSVVTVPSSNF | |
| | HC | [sequence omitted] | 841 |
| | variable | GYTFTTYAMHWVRQAPGQRLEWMGW | |
| | | INAGNGNTKYSQNFQGRVTITRDTS | |
| | | ASTAYMELSSLRSEDTAVYYCASLV | |
| | | GGDSSSWYDYMDVWGKGTTVTVSS | |
| | HCDR1 | TYAMH | 842 |
| | HCDR2 | WINAGNGNTKYSQNFQG | 843 |
| | HCDR3 | LVGGDSSSWYDYMDV | 844 |
| | HFR1 | [sequence omitted] | 190 |
| | | GYTFT | |
| | HFR2 | WVRQAPGQRLEWMG | 287 |
| | HFR3 | RVTITRDTSASTAYMELSSLRSEDT | 845 |
| | | AVYYCAS | |
| | HFR4 | WGKGTTVTVSS | 670 |
| | LC | DIQMTQSPSTLSASVGDRVTITCRA | 846 |
| | | SQSISSWLAWYQQKPGKAPKLLIYD | |
| | | ASSLESGVPSRFSGSGSGTEFTLTI | |
| | | SSLQPDDFATYYCQQYNSYPWTFGQ | |
| | | GTKVEIKRTVAAPSVFIFPPSDEQL | |
| | | KSGTASVVCLLNNFYPREAKVQWKV | |
| | | DNALQSGNSQESVTEQDSKDSTYSL | |
| | | SSTLTLSKADYE | |
| | LC | DIQMTQSPSTLSASVGDRVTITCRA | 847 |
| | variable | SQSISSWLAWYQQKPGKAPKLLIYD | |
| | | ASSLESGVPSRFSGSGSGTEFTLTI | |
| | | SSLQPDDFATYYCQQYNSYPWTFGQ | |
| | | GTKVEIK | |
| | LCDR1 | RASQSISSWLA | 520 |
| | LCDR2 | DASSLES | 387 |
| | LCDR3 | QQYNSYPWT | 646 |
| | LFR1 | DIQMTQSPSTLSASVGDRVTITC | 523 |
| | LFR2 | WYQQKPGKAPKLLIY | 252 |
| | LFR3 | GVPSRFSGSGSGTEFTLTISSLQPD | 524 |
| | | DFATYYC | |
| | LFR4 | FGQGTKVEIK | 53 |
| S144- | HC | [sequence omitted] | 848 |
| 1407 | | GGTFSSYTISWVRQAPGQGLEWMGR | |
| | | IIPVRDIANYAQKFQGRVTITADKS | |
| | | TRTAYMEVSSLRSEDTAVYYCAATE | |
| | | LRSDGLDIWGQGTMVTVSSASTKGP | |
| | | SVFPLAPSSKSTSGGTAALGCLVKD | |
| | | YFPEPVTVSWNSGALTSGVHTFPAV | |
| | | LQSSG | |
| | HC | [sequence omitted] | 849 |
| | variable | GGTFSSYTISWVRQAPGQGLEWMGR | |
| | | IIPVRDIANYAQKFQGRVTITADKS | |
| | | TRTAYMEVSSLRSEDTAVYYCAATE | |
| | | LRSDGLDIWGQGTMVTVSS | |
| | HCDR1 | SYTIS | 850 |
| | HCDR2 | RIIPVRDIANYAQKFQG | 851 |
| | HCDR3 | TELRSDGLDI | 852 |
| | HFR1 | [sequence omitted] | 310 |
| | | GGTFS | |
| | HFR2 | WVRQAPGQGLEWMG | 160 |
| | HFR3 | RVTITADKSTRTAYMEVSSLRSEDT | 853 |
| | | AVYYCAA | |
| | HFR4 | WGQGTMVTVSS | 44 |
| | LC | DIQMTQSPSTLSASVGDRVTITCRA | 854 |
| | | SQSISSWLAWYQQKPGKAPKLLIYD | |
| | | ASSLESGVPSRFSGSGSGTEFTLTV | |
| | | SSLQPDDFATYYCQQYNNYSPITFG | |
| | | QGTKLEIKRTVAAPSVFIFPPSDEQ | |
| | | LKSGTASVVCLLNNFYPREAKVQWK | |
| | | VDNALQSGNSQESVTEQDSKDSTYS | |
| | | LSSTLTLSKADYE | |
| | LC | DIQMTQSPSTLSASVGDRVTITCRA | 855 |
| | variable | SQSISSWLAWYQQKPGKAPKLLIYD | |
| | | ASSLESGVPSRFSGSGSGTEFTLTV | |
| | | SSLQPDDFATYYCQQYNNYSPITFG | |
| | | QGTKLEIK | |
| | LCDR1 | RASQSISSWLA | 520 |
| | LCDR2 | DASSLES | 387 |
| | LCDR3 | QQYNNYSPIT | 856 |
| | LFR1 | DIQMTQSPSTLSASVGDRVTITC | 523 |
| | LFR2 | WYQQKPGKAPKLLIY | 252 |
| | LFR3 | GVPSRFSGSGSGTEFTLTVSSLQPD | 857 |
| | | DFATYYC | |
| | LFR4 | FGQGTKLEIK | 380 |
| S144- | HC | [sequence omitted] | 858 |
| 1569 | | GYTFSNYGISWVRQAPGQGLEWMGW | |
| | | ISAYNGNTKYPQKLQGRVTMSTDTS | |
| | | TSTAYMELRSLRSDDTAVYYCARET | |
| | | RYGMDVWGQGTTVTVSSASTKGPSV | |
| | | FPLAPSSKSTSGGTAALGCLVKDYF | |
| | | PEPVTVSWNSGALTSGVHTFPAVLQ | |
| | | SSG | |
| | HC | [sequence omitted] | 859 |
| | variable | GYTFSNYGISWVRQAPGQGLEWMGW | |
| | | ISAYNGNTKYPQKLQGRVTMSTDTS | |
| | | TSTAYMELRSLRSDDTAVYYCARET | |
| | | RYGMDVWGQGTTVTVSS | |
| | HCDR1 | NYGIS | 860 |
| | HCDR2 | WISAYNGNTKYPQKLQG | 861 |
| | HCDR3 | ETRYGMDV | 862 |
| | HFR1 | [sequence omitted] | 863 |
| | | GYTFS | |
| | HFR2 | WVRQAPGQGLEWMG | 160 |
| | HFR3 | RVTMSTDTSTSTAYMELRSLRSDDT | 864 |
| | | AVYYCAR | |
| | HFR4 | WGQGTTVTVSS | 147 |
| | LC | QPVLTQPPSASASLGASVTLTCTLS | 865 |
| | | SGYSNYKVDWYQQRPGKGPQFVMRV | |
| | | GTGGIVGSKGDGIPDRFSVLGSGLN | |
| | | RYLTIKNIQEEDESDYHCGADHGSG | |
| | | SNFVRVFGGGTKLTVLGQPKAAPSV | |
| | | TLFPPSSEELQANKATLVCLISDFY | |
| | | PGAVTVAWKADSSPVKAGVETTTPS | |
| | | KQSNNKYAASSYLSLTPEQWKSH | |
| | LC | QPVLTQPPSASASLGASVTLTCTLS | 866 |
| | variable | SGYSNYKVDWYQQRPGKGPQFVMRV | |
| | | GTGGIVGSKGDGIPDRFSVLGSGLN | |
| | | RYLTIKNIQEEDESDYHCGADHGSG | |
| | | SNFVRVFGGGTKLTVL | |
| | LCDR1 | TLSSGYSNYKVD | 867 |
| | LCDR2 | VGTGGIVGSKGD | 868 |
| | LCDR3 | GADHGSGSNFVRV | 869 |
| | LFR1 | QPVLTQPPSASASLGASVTLTC | 870 |
| | LFR2 | WYQQRPGKGPQFVMR | 871 |
| | LFR3 | GIPDRFSVLGSGLNRYLTIKNIQEE | 872 |
| | | DESDYHC | |
| | LFR4 | FGGGTKLTVL | 69 |
| S144- | HC | EVQLVQSGAEVKKPGESLKISCKGS | 873 |
| 1641 | | GYTFTSYWIGWVRQMPGKGLEWMGI | |
| | | IYLGDSDTRYSPSFQGQVTISADKS | |
| | | ISTAYLQWNSLKASDTAMYYCARQV | |
| | | TGTTSWFDPWGQGTLVTVSSASTKG | |
| | | PSVFPLAPSSKSTSGGTAALGCLVK | |
| | | DYFPEPVTVSWNSGALTSGVHTFPA | |
| | | VLQSSG | |
| | HC | EVQLVQSGAEVKKPGESLKISCKGS | 874 |
| | variable | GYTFTSYWIGWVRQMPGKGLEWMGI | |
| | | IYLGDSDTRYSPSFQGQVTISADKS | |
| | | ISTAYLQWNSLKASDTAMYYCARQV | |
| | | TGTTSWFDPWGQGTLVTVSS | |
| | HCDR1 | SYWIG | 542 |
| | HCDR2 | IIYLGDSDTRYSPSFQG | 875 |
| | HCDR3 | QVTGTTSWFDP | 876 |
| | HFR1 | EVQLVQSGAEVKKPGESLKISCKGS | 877 |
| | | GYTFT | |
| | HFR2 | WVRQMPGKGLEWMG | 174 |
| | HFR3 | QVTISADKSISTAYLQWNSLKASDT | 878 |
| | | AMYYCAR | |
| | HFR4 | WGQGTLVTVSS | 60 |
| | LC | DIQMTQSPSTLSASVGERVTITCRA | 879 |
| | | SQSISRWLAWYQQKPGKAPKLLIYD | |
| | | ASSLESGVPSRFSGSGSGTEFTLTI | |
| | | SSLQPDDFATYHCHQYSTYSLTFGG | |
| | | GTKVDIKRTVAAPSVFIFPPSDEQL | |
| | | KSGTASVVCLLNNFYPREAKVQWKV | |
| | | DNALQSGNSQESVTEQDSKDSTYSL | |
| | | SSTLTLSKADYE | |
| | LC | DIQMTQSPSTLSASVGERVTITCRA | 880 |
| | variable | SQSISRWLAWYQQKPGKAPKLLIYD | |
| | | ASSLESGVPSRFSGSGSGTEFTLTI | |
| | | SSLQPDDFATYHCHQYSTYSLTFGG | |
| | | GTKVDIK | |
| | LCDR1 | RASQSISRWLA | 881 |
| | LCDR2 | DASSLES | 387 |
| | LCDR3 | HQYSTYSLT | 882 |
| | LFR1 | DIQMTQSPSTLSASVGERVTITC | 883 |
| | LFR2 | WYQQKPGKAPKLLIY | 252 |
| | LFR3 | GVPSRFSGSGSGTEFTLTISSLQPD | 884 |
| | | DFATYHC | |
| | LFR4 | FGGGTKVDIK | 885 |
| S144- | HC | EVQLVESGGDVVQPGGSLRLSCAAS | 886 |
| 1827 | | GITFSNYWMTWVRQAPGKGLEWVAT | |
| | | IKKDGGEQYYVDSVKGRFTISRDNA | |
| | | RNSLYLQINSLRAEDTAVYYCARGG | |
| | | SSSSYYWIYWGQGTLVTVSSGSASA | |
| | | PTLFPLVSCENSPSDTSSV | |
| | HC | EVQLVESGGDVVQPGGSLRLSCAAS | 887 |
| | variable | GITFSNYWMTWVRQAPGKGLEWVAT | |
| | | IKKDGGEQYYVDSVKGRFTISRDNA | |
| | | RNSLYLQINSLRAEDTAVYYCARGG | |
| | | SSSSYYWIYWGQGTLVTVSS | |
| | HCDR1 | NYWMT | 888 |
| | HCDR2 | TIKKDGGEQYYVDSVKG | 889 |
| | HCDR3 | GGSSSSYYWIY | 890 |
| | HFR1 | EVQLVESGGDVVQPGGSLRLSCAAS | 891 |
| | | GITFS | |
| | HFR2 | WVRQAPGKGLEWVA | 145 |
| | HFR3 | RFTISRDNARNSLYLQINSLRAEDT | 892 |
| | | AVYYCAR | |
| | HFR4 | WGQGTLVTVSS | 60 |
| | LC | EIVLTQSPGTLSLSPGERATLSCRA | 893 |
| | | SQSISNSYLVWYQQKPGQAPRLLIY | |
| | | GASTRATGIPDRFSGSGSGTDFTLT | |
| | | ISRLEPEDFAVYYCQQYGSSPWTFG | |
| | | QGTTVEIKRTVAAPSVFIFPPSDEQ | |
| | | LKSGTASVVCLLNNFYPREAKVQWK | |
| | | VDNALQSGNSQESVTEQDSKDSTYS | |
| | | LSSTLTLSKADYE | |
| | LC | EIVLTQSPGTLSLSPGERATLSCRA | 894 |
| | variable | SQSISNSYLVWYQQKPGQAPRLLIY | |
| | | GASTRATGIPDRFSGSGSGTDFTLT | |
| | | ISRLEPEDFAVYYCQQYGSSPWTFG | |
| | | QGTTVEIK | |
| | LCDR1 | RASQSISNSYLV | 895 |
| | LCDR2 | GASTRAT | 208 |
| | LCDR3 | QQYGSSPWT | 303 |
| | LFR1 | EIVLTQSPGTLSLSPGERATLSC | 50 |
| | LFR2 | WYQQKPGQAPRLLIY | 182 |
| | LFR3 | GIPDRFSGSGSGTDFTLTISRLEPE | 196 |
| | | DFAVYYC | |
| | LFR4 | FGQGTTVEIK | 896 |
| S144- | HC | EVQLVESGGGLVKPGGSLRLSCAAS | 897 |
| 1848 | | GFTFSSYSMNWVRQAPGKGLEWVSS | |
| | | ISSSSSYIYYADSVKGRFTISRDNA | |
| | | KNSLYLQLNSLRAEDTAVYYCARDR | |
| | | DQLIFSAAFDIWGQGTMVTVSSAST | |
| | | KGPSVFPLAPSSKSTSGGTAALGCL | |
| | | VKDYFPEPVTVSWNSGALTSGVHTF | |
| | | PAVLQSSG | |
| | HC | EVQLVESGGGLVKPGGSLRLSCAAS | 898 |
| | variable | GFTFSSYSMNWVRQAPGKGLEWVSS | |
| | | ISSSSSYIYYADSVKGRFTISRDNA | |
| | | KNSLYLQLNSLRAEDTAVYYCARDR | |
| | | DQLIFSAAFDIWGQGTMVTVSS | |
| | HCDR1 | SYSMN | 126 |
| | HCDR2 | SISSSSSYIYYADSVKG | 899 |
| | HCDR3 | DRDQLIFSAAFDI | 900 |
| | HFR1 | EVQLVESGGGLVKPGGSLRLSCAAS | 602 |
| | | GFTFS | |
| | HFR2 | WVRQAPGKGLEWVS | 130 |
| | HFR3 | RFTISRDNAKNSLYLQLNSLRAEDT | 901 |
| | | AVYYCAR | |
| | HFR4 | WGQGTMVTVSS | 44 |
| | LC | QSVLTQPPSASGTPGQRVTISCSGS | 902 |
| | | SSNIEHNYVFWYQQLPGTAPKLLIY | |
| | | SNNHRPSGVPDRFSGSKSGTSASLA | |
| | | ISGLRSEDEADYYCAAWDASLSGPV | |
| | | VFAGGTKLTVLGQPKAAPSVTLFPP | |
| | | SSEELQANKATLVCLISDFYPGAVT | |
| | | VAWKADSSPVKAGVETTTPSKQSNN | |
| | | KYAASS | |
| | LC | QSVLTQPPSASGTPGQRVTISCSGS | 903 |
| | variable | SSNIEHNYVFWYQQLPGTAPKLLIY | |
| | | SNNHRPSGVPDRFSGSKSGTSASLA | |
| | | ISGLRSEDEADYYCAAWDASLSGPV | |
| | | VFAGGTKLTVL | |
| | LCDR1 | SGSSSNIEHNYVF | 904 |
| | LCDR2 | SNNHRPS | 905 |
| | LCDR3 | AAWDASLSGPVV | 906 |
| | LFR1 | QSVLTQPPSASGTPGQRVTISC | 121 |
| | LFR2 | WYQQLPGTAPKLLIY | 122 |
| | LFR3 | GVPDRFSGSKSGTSASLAISGLRSE | 406 |
| | | DEADYYC | |
| | LFR4 | FAGGTKLTVL | 907 |
| S144- | HC | [sequence omitted] | 908 |
| 1850 | | GFTFSSYAMSWVRQAPGKGLEWVSA | |
| | | ISGSGGSTYYADSVKGRFTISRANS | |
| | | KNTLYLQMNSLRAEDTAVYYCAKGP | |
| | | RFSRDYFDYWGQGTLVTVSSASTKG | |
| | | PSVFPLAPSSKSTSGGTAALGCLVK | |
| | | DYFPEPVTVSWNSGALTSGVHTFPA | |
| | | VLQSSG | |
| | HC | [sequence omitted] | 909 |
| | variable | GFTFSSYAMSWVRQAPGKGLEWVSA | |
| | | ISGSGGSTYYADSVKGRFTISRANS | |
| | | KNTLYLQMNSLRAEDTAVYYCAKGP | |
| | | RFSRDYFDYWGQGTLVTVSS | |
| | HCDR1 | SYAMS | 610 |
| | HCDR2 | AISGSGGSTYYADSVKG | 910 |
| | HCDR3 | GPRFSRDYFDY | 911 |
| | HFR1 | [sequence omitted] | 613 |
| | | GFTFS | |
| | HFR2 | WVRQAPGKGLEWVS | 130 |
| | HFR3 | RFTISRANSKNTLYLQMNSLRAEDT | 912 |
| | | AVYYCAK | |
| | HFR4 | WGQGTLVTVSS | 60 |
| | LC | DIQMTQSPSTLSASVGDRVTITCRA | 913 |
| | | SQSITSWLAWYQQKPGKAPKLLIYD | |
| | | ASNLESGVPSRFSGSGSGTEFTLTI | |
| | | SSLQPDDFATYYCQQYNNYLGTFGQ | |
| | | GTKVEIKRTVAAPSVFIFPPSDEQL | |
| | | KSGTASVVCLLNNFYPREAKVQWKV | |
| | | DNALQSGNSQESVTEQDSKDSTYSL | |
| | | SSTLTLSKADYE | |
| | LC | DIQMTQSPSTLSASVGDRVTITCRA | 914 |
| | variable | SQSITSWLAWYQQKPGKAPKLLIYD | |
| | | ASNLESGVPSRFSGSGSGTEFTLTI | |
| | | SSLQPDDFATYYCQQYNNYLGTFGQ | |
| | | GTKVEIK | |
| | LCDR1 | RASQSITSWLA | 645 |
| | LCDR2 | DASNLES | 915 |
| | LCDR3 | QQYNNYLGT | 916 |
| | LFR1 | DIQMTQSPSTLSASVGDRVTITC | 523 |
| | LFR2 | WYQQKPGKAPKLLIY | 252 |
| | LFR3 | GVPSRFSGSGSGTEFTLTISSLQPD | 524 |
| | | DFATYYC | |
| | LFR4 | FGQGTKVEIK | 53 |
| S144- | HC | [sequence omitted] | 917 |
| 2234 | | GGTFSRYTISWVRQAPGQGLEWMGR | |
| | | IIPILGTANYAQNFQGRVTITADKS | |
| | | TSTAYMELSSLRSEDTAVYYCARHG | |
| | | YSYGPFDYWGQGTLVTVSSASTKGP | |
| | | SVFPLAPSSKSTSGGTAALGCLVKD | |
| | | YFPEPVTVSWNSGALTSGVHTFPAV | |
| | | LQSSG | |
| | HC | [sequence omitted] | 918 |
| | variable | GGTFSRYTISWVRQAPGQGLEWMGR | |
| | | IIPILGTANYAQNFQGRVTITADKS | |
| | | TSTAYMELSSLRSEDTAVYYCARHG | |
| | | YSYGPFDYWGQGTLVTVSS | |
| | HCDR1 | RYTIS | 919 |
| | HCDR2 | RIIPILGTANYAQNFQG | 920 |
| | HCDR3 | HGYSYGPFDY | 921 |
| | HFR1 | [sequence omitted] | 310 |
| | | GGTFS | |
| | HFR2 | WVRQAPGQGLEWMG | 160 |
| | HFR3 | RVTITADKSTSTAYMELSSLRSEDT | 161 |
| | | AVYYCAR | |
| | HFR4 | WGQGTLVTVSS | 60 |
| | LC | DIVMTQSPDSLTVSLGERATINCKS | 922 |
| | | SQSVLYSSNNKNYLAWYQQKPGQPP | |
| | | KLLIYWASTRESGVPDRFSGSGSGT | |
| | | DFTLTVSSLQAEDVAVYYCQQYYST | |
| | | PGTFGQGTKVEIKRTVAAPSVFIFP | |
| | | PSDEQLKSGTASVVCLLNNFYPREA | |
| | | KVQWKVDNALQSGNSQESVTEQDSK | |
| | | DSTYSLSSTLTLSKADYE | |
| | LC | DIVMTQSPDSLTVSLGERATINCKS | 923 |
| | variable | SQSVLYSSNNKNYLAWYQQKPGQPP | |
| | | KLLIYWASTRESGVPDRFSGSGSGT | |
| | | DFTLTVSSLQAEDVAVYYCQQYYST | |
| | | PGTFGQGTKVEIK | |
| | LCDR1 | KSSQSVLYSSNNKNYLA | 291 |
| | LCDR2 | WASTRES | 30 |
| | LCDR3 | QQYYSTPGT | 924 |
| | LFR1 | DIVMTQSPDSLTVSLGERATINC | 925 |
| | LFR2 | WYQQKPGQPPKLLIY | 33 |
| | LFR3 | GVPDRFSGSGSGTDFTLTVSSLQAE | 926 |
| | | DVAVYYC | |
| | LFR4 | FGQGTKVEIK | 53 |
| S564-105 | HC | QVRLQESGPGLVKPSQTLSLTCTVS | 927 |
| | | GGSISSGSYYWSWIRQPAGKGLEWI | |
| | | GRFHTSGSTNYNPSLKSRVTISVDT | |
| | | SKNQFSLKLSSVTAADTAVYYCARD | |
| | | LKGKTWIQTPFDYWGQGILVTVSSA | |
| | | STKGPSVFPLAPSSKSTSGGTAALG | |
| | | CLVKDYFPEPVTVSWNSGALTSGVH | |
| | | TFPAVLQSSG | |
| | HC | QVRLQESGPGLVKPSQTLSLTCTVS | 928 |
| | variable | GGSISSGSYYWSWIRQPAGKGLEWI | |
| | | GRFHTSGSTNYNPSLKSRVTISVDT | |
| | | SKNQFSLKLSSVTAADTAVYYCARD | |
| | | LKGKTWIQTPFDYWGQGILVTVSS | |
| | HCDR1 | SGSYYWS | 929 |
| | HCDR2 | RFHTSGSTNYNPSLKS | 930 |
| | HCDR3 | DLKGKTWIQTPFDY | 931 |
| | HFR1 | QVRLQESGPGLVKPSQTLSLTCTVS | 932 |
| | | GGSIS | |
| | HFR2 | WIRQPAGKGLEWIG | 25 |
| | HFR3 | RVTISVDTSKNQFSLKLSSVTAADT | 115 |
| | | AVYYCAR | |
| | HFR4 | WGQGILVTVSS | 220 |
| | LC | QSALTQPASVSGSPGQSITISCTGT | 933 |
| | | SSDVGAYNYVSWYQQHPGKAPKLMI | |
| | | YEVSNRPSGVSNRFSGSKSGNTASL | |
| | | TISGLQAEDEADYYCSSYTSSTFFG | |
| | | TGTTVTVLGQPKANPTVTLFPPSSE | |
| | | ELQANKATLVCLISDFYPGAVTVAW | |
| | | KADGSPVKAGVETTTPSKQSNNKYA | |
| | | ASSY | |
| | LC | QSALTQPASVSGSPGQSITISCTGT | 934 |
| | variable | SSDVGAYNYVSWYQQHPGKAPKLMI | |
| | | YEVSNRPSGVSNRFSGSKSGNTASL | |
| | | TISGLQAEDEADYYCSSYTSSTFFG | |
| | | TGTTVTVL | |
| | LCDR1 | TGTSSDVGAYNYVS | 935 |
| | LCDR2 | EVSNRPS | 151 |
| | LCDR3 | SSYTSSTF | 936 |
| | LFR1 | QSALTQPASVSGSPGQSITISC | 66 |
| | LFR2 | WYQQHPGKAPKLMIY | 67 |
| | LFR3 | GVSNRFSGSKSGNTASLTISGLQAE | 68 |
| | | DEADYYC | |
| | LFR4 | FGTGTTVTVL | 937 |
| S564-14 | HC | [sequence omitted] | 938 |
| | | GLTFSSYWMSWARQAPGKGLEWVAN | |
| | | IKKDGSEKYYVDSVKGRFTISRDNA | |
| | | KNSLYLQMNSLRVEDTAVYYCASEP | |
| | | PHYGGNSGAEYFQHWGQGTLVTVSS | |
| | | APTKAPDVFPIISGCRHPKDNSPVV | |
| | | LACLITGYH | |
| | HC | [sequence omitted] | 939 |
| | variable | GLTFSSYWMSWARQAPGKGLEWVAN | |
| | | IKKDGSEKYYVDSVKGRFTISRDNA | |
| | | KNSLYLQMNSLRVEDTAVYYCASEP | |
| | | PHYGGNSGAEYFQHWGQGTLVTVSS | |
| | HCDR1 | SYWMS | 270 |
| | HCDR2 | NIKKDGSEKYYVDSVKG | 940 |
| | HCDR3 | EPPHYGGNSGAEYFQH | 941 |
| | HFR1 | [sequence omitted] | 942 |
| | | GLTFS | |
| | HFR2 | WARQAPGKGLEWVA | 943 |
| | HFR3 | RFTISRDNAKNSLYLQMNSLRVEDT | 944 |
| | | AVYYCAS | |
| | HFR4 | WGQGTLVTVSS | 60 |
| | LC | SYVLTQPPSVSVAPGKTARITCGGN | 945 |
| | | NIGSKSVHWYQQRPGQAPVLVIYYD | |
| | | SDRPSGIPERFSGSNSGNTATLTIS | |
| | | RVEAGDEADYYCQVWDSSSDHHYVF | |
| | | GTGTKVTVLGQPKANPTVTLFPPSS | |
| | | EELQANKATLVCLISDFYPGAVTVA | |
| | | WKADSSPVKAGVETTKPSKQSNNKY | |
| | | AASS | |
| | LC | SYVLTQPPSVSVAPGKTARITCGGN | 946 |
| | variable | NIGSKSVHWYQQRPGQAPVLVIYYD | |
| | | SDRPSGIPERFSGSNSGNTATLTIS | |
| | | RVEAGDEADYYCQVWDSSSDHHYVF | |
| | | GTGTKVTVL | |
| | LCDR1 | GGNNIGSKSVH | 12 |
| | LCDR2 | YDSDRPS | 947 |
| | LCDR3 | QVWDSSSDHHYV | 948 |
| | LFR1 | SYVLTQPPSVSVAPGKTARITC | 949 |
| | LFR2 | WYQQRPGQAPVLVIY | 950 |
| | LFR3 | GIPERFSGSNSGNTATLTISRVEAG | 17 |
| | | DEADYYC | |
| | LFR4 | FGTGTKVTVL | 18 |
| S564-68 | HC | [sequence omitted] | 951 |
| | | GYIFTGYYMHWVRQAPGQGLEWMGW | |
| | | INPNSGGTNYAQKFQGRVTMTRDTS | |
| | | ITTAYMELSRLRSDDTAFYYCARVK | |
| | | RFSIFGVELDYWGQGTLVTVSSAST | |
| | | KGPSVFPLAPSSKSTSGGTAALGCL | |
| | | VKDYFPEPVTVSWNSGALTSGVHTF | |
| | | PAVLQSSG | |
| | HC | [sequence omitted] | 952 |
| | variable | GYIFTGYYMHWVRQAPGQGLEWMGW | |
| | | INPNSGGTNYAQKFQGRVTMTRDTS | |
| | | ITTAYMELSRLRSDDTAFYYCARVK | |
| | | RFSIFGVELDYWGQGTLVTVSS | |
| | HCDR1 | GYYMH | 187 |
| | HCDR2 | WINPNSGGTNYAQKFQG | 953 |
| | HCDR3 | VKRFSIFGVELDY | 954 |
| | HFR1 | [sequence omitted] | 955 |
| | | GYIFT | |
| | HFR2 | WVRQAPGQGLEWMG | 160 |
| | HFR3 | RVTMTRDTSITTAYMELSRLRSDDT | 956 |
| | | AFYYCAR | |
| | HFR4 | WGQGTLVTVSS | 60 |
| | LC | QSALTQPPSASGSPGQSVTISCTGT | 957 |
| | | SSDVGGYNYVSWYQQHPGKAPKLMI | |
| | | YEVSKRPSGVPDRFSGSKSGNTASL | |
| | | TVSGLQAEDEADYFCSSYADSNNLV | |
| | | FGGGTKLTVLGQPKAAPSVTLFPPS | |
| | | SEELQANKATLVCLISDFCPGAVTV | |
| | | AWKADSSPVKAGVETTTPSKQSNNK | |
| | | YAASSY | |
| | LC | QSALTQPPSASGSPGQSVTISCTGT | 958 |
| | variable | SSDVGGYNYVSWYQQHPGKAPKLMI | |
| | | YEVSKRPSGVPDRFSGSKSGNTASL | |
| | | TVSGLQAEDEADYFCSSYADSNNLV | |
| | | FGGGTKLTVL | |
| | LCDR1 | TGTSSDVGGYNYVS | 63 |
| | LCDR2 | EVSKRPS | 94 |
| | LCDR3 | SSYADSNNLV | 959 |
| | LFR1 | QSALTQPPSASGSPGQSVTISC | 96 |
| | LFR2 | WYQQHPGKAPKLMIY | 67 |
| | LFR3 | GVPDRFSGSKSGNTASLTVSGLQAE | 960 |
| | | DEADYFC | |
| | LFR4 | FGGGTKLTVL | 69 |
| S564-98 | HC | QVQLQESGPGLVKPSETLSLTCTVS | 961 |
| | | GGSISSYYWSWIRQPPGKGLEWIGY | |
| | | IYYSGSTNYNPSLKSRVTISVDTSK | |
| | | NQFSLKLSSVTAADTAVYYCARHQS | |
| | | RWNIVATMDFDYWGQGTLVTVSSAS | |
| | | TKGPSVFPL | |
| | HC | QVQLQESGPGLVKPSETLSLTCTVS | 962 |
| | variable | GGSISSYYWSWIRQPPGKGLEWIGY | |
| | | IYYSGSTNYNPSLKSRVTISVDTSK | |
| | | NQFSLKLSSVTAADTAVYYCARHQS | |
| | | RWNIVATMDFDYWGQGTLVTVSS | |
| | HCDR1 | SYYWS | 56 |
| | HCDR2 | YIYYSGSTNYNPSLKS | 4 |
| | HCDR3 | HQSRWNIVATMDFDY | 963 |
| | HFR1 | QVQLQESGPGLVKPSETLSLTCTVS | 24 |
| | | GGSIS | |
| | HFR2 | WIRQPPGKGLEWIG | 7 |
| | HFR3 | RVTISVDTSKNQFSLKLSSVTAADT | 115 |
| | | AVYYCAR | |
| | HFR4 | WGQGTLVTVSS | 60 |
| | LC | DIQMTQSPSSLSASVGDRVTITCRA | 964 |
| | | SQSIRSYLNWYQQKPGKAPKLLIYA | |
| | | ASSLQSGVPSRFSGSGSGTDFTLTI | |
| | | GSLQPEDFATYYCQQSYSTSVAFGQ | |
| | | GTKVEIKRTVAAPSVFIFPPSDEQL | |
| | | KSGTASVVCLLNNFYPREAKVQWKV | |
| | | DNALQSGNSQESVTEQDSKDSTYSL | |
| | | SSTLTLSKADYE | |
| | LC | DIQMTQSPSSLSASVGDRVTITCRA | 965 |
| | variable | SQSIRSYLNWYQQKPGKAPKLLIYA | |
| | | ASSLQSGVPSRFSGSGSGTDFTLTI | |
| | | GSLQPEDFATYYCQQSYSTSVAFGQ | |
| | | GTKVEIK | |
| | LCDR1 | RASQSIRSYLN | 432 |
| | LCDR2 | AASSLQS | 249 |
| | LCDR3 | QQSYSTSVA | 966 |
| | LFR1 | DIQMTQSPSSLSASVGDRVTITC | 251 |
| | LFR2 | WYQQKPGKAPKLLIY | 252 |
| | LFR3 | GVPSRFSGSGSGTDFTLTIGSLQPE | 967 |
| | | DFATYYC | |
| | LFR4 | FGQGTKVEIK | 53 |
| S564-105 | HC | QVRLQESGPGLVKPSQTLSLTCTVS | 927 |
| | | GGSISSGSYYWSWIRQPAGKGLEWI | |
| | | GRFHTSGSTNYNPSLKSRVTISVDT | |
| | | SKNQFSLKLSSVTAADTAVYYCARD | |
| | | LKGKTWIQTPFDYWGQGILVTVSSA | |
| | | STKGPSVFPLAPSSKSTSGGTAALG | |
| | | CLVKDYFPEPVTVSWNSGALTSGVH | |
| | | TFPAVLQSSG | |
| | HC | QVRLQESGPGLVKPSQTLSLTCTVS | 928 |
| | variable | GGSISSGSYYWSWIRQPAGKGLEWI | |
| | | GRFHTSGSTNYNPSLKSRVTISVDT | |
| | | SKNQFSLKLSSVTAADTAVYYCARD | |
| | | LKGKTWIQTPFDYWGQGILVTVSS | |
| | HCDR1 | SGSYYWS | 929 |
| | HCDR2 | RFHTSGSTNYNPSLKS | 930 |
| | HCDR3 | DLKGKTWIQTPFDY | 931 |
| | HFR1 | QVRLQESGPGLVKPSQTLSLTCTVS | 932 |
| | | GGSIS | |
| | HFR2 | WIRQPAGKGLEWIG | 25 |
| | HFR3 | RVTISVDTSKNQFSLKLSSVTAADT | 115 |
| | | AVYYCAR | |
| | HFR4 | WGQGILVTVSS | 220 |
| | LC | QSALTQPASVSGSPGQSITISCTGT | 933 |
| | | SSDVGAYNYVSWYQQHPGKAPKLMI | |
| | | YEVSNRPSGVSNRFSGSKSGNTASL | |
| | | TISGLQAEDEADYYCSSYTSSTFFG | |
| | | TGTTVTVLGQPKANPTVTLFPPSSE | |
| | | ELQANKATLVCLISDFYPGAVTVAW | |
| | | KADGSPVKAGVETTTPSKQSNNKYA | |
| | | ASSY | |
| | LC | QSALTQPASVSGSPGQSITISCTGT | 934 |
| | variable | SSDVGAYNYVSWYQQHPGKAPKLMI | |
| | | YEVSNRPSGVSNRFSGSKSGNTASL | |
| | | TISGLQAEDEADYYCSSYTSSTFFG | |
| | | TGTTVTVL | |
| | LCDR1 | TGTSSDVGAYNYVS | 935 |
| | LCDR2 | EVSNRPS | 151 |
| | LCDR3 | SSYTSSTF | 936 |
| | LFR1 | QSALTQPASVSGSPGQSITISC | 66 |
| | LFR2 | WYQQHPGKAPKLMIY | 67 |
| | LFR3 | GVSNRFSGSKSGNTASLTISGLQAE | 68 |
| | | DEADYYC | |
| | LFR4 | FGTGTTVTVL | 937 |
| S564-134 | HC | [sequence omitted] | 968 |
| | | GYTFTGYYMHWVRQAPGQGLEWMGW | |
| | | INPNSGGTNYAQKFQGRVTMTRDTS | |
| | | INTAYMELSRLRSDDTAVYYCTRVG | |
| | | RFSIFGVELDYWGQGTLVTVSSAST | |
| | | KGPSVFPLAPSSKSTSGGTAALGCL | |
| | | VKDYFPEPVTVSWNSGALTSGVHTF | |
| | | PAVLQSSG | |
| | HC | [sequence omitted] | 969 |
| | variable | GYTFTGYYMHWVRQAPGQGLEWMGW | |
| | | INPNSGGTNYAQKFQGRVTMTRDTS | |
| | | INTAYMELSRLRSDDTAVYYCTRVG | |
| | | RFSIFGVELDYWGQGTLVTVSS | |
| | HCDR1 | GYYMH | 187 |
| | HCDR2 | WINPNSGGTNYAQKFQG | 953 |
| | HCDR3 | VGRFSIFGVELDY | 970 |
| | HFR1 | [sequence omitted] | 190 |
| | | GYTFT | |
| | HFR2 | WVRQAPGQGLEWMG | 160 |
| | HFR3 | RVTMTRDTSINTAYMELSRLRSDDT | 971 |
| | | AVYYCTR | |
| | HFR4 | WGQGTLVTVSS | 60 |
| | LC | QSALTQPPSASGSPGQSVTISCTGT | 972 |
| | | SSDVGGYNYVSWYQQHPGKAPKLMI | |
| | | YEVNKRPSGVPDRFSGSKSGNTASL | |
| | | TVSGLQADDEADYYCSSYAGSNNLV | |
| | | FGGGTKLTVLGQPKAAPSVTLFPPS | |
| | | SEELQANKATLVCLISDFYPGAVTV | |
| | | AWKADSSPVKAGVETTTPSKQSNNK | |
| | | YAASS | |
| | LC | QSALTQPPSASGSPGQSVTISCTGT | 973 |
| | variable | SSDVGGYNYVSWYQQHPGKAPKLMI | |
| | | YEVNKRPSGVPDRFSGSKSGNTASL | |
| | | TVSGLQADDEADYYCSSYAGSNNLV | |
| | | FGGGTKLTVL | |
| | LCDR1 | TGTSSDVGGYNYVS | 63 |
| | LCDR2 | EVNKRPS | 974 |
| | LCDR3 | SSYAGSNNLV | 975 |
| | LFR1 | QSALTQPPSASGSPGQSVTISC | 96 |
| | LFR2 | WYQQHPGKAPKLMIY | 67 |
| | LFR3 | GVPDRFSGSKSGNTASLTVSGLQAD | 976 |
| | | DEADYYC | |
| | LFR4 | FGGGTKLTVL | 69 |
| S564-138 | HC | QVLLVQSGAEVKKPGASVKVSCKAS | 977 |
| | | GYTFTGYYLHWVRQAPGQGLEWMGW | |
| | | INPISGGTNYAQNFQDRVTMTRDTS | |
| | | IITAYMELSRLRSDDTAVYYCARLA | |
| | | YYYDSSAYRGAFDIWGQGTMVTVSS | |
| | | ASTKGPSVFPLAPSSKSTSGGTAAL | |
| | | GCLVKDYFPEPVTVSWNSGALTSGV | |
| | | HTFPAVLQSS | |
| | HC | QVLLVQSGAEVKKPGASVKVSCKAS | 978 |
| | variable | GYTFTGYYLHWVRQAPGQGLEWMGW | |
| | | INPISGGTNYAQNFQDRVTMTRDTS | |
| | | IITAYMELSRLRSDDTAVYYCARLA | |
| | | YYYDSSAYRGAFDIWGQGTMVTVSS | |
| | HCDR1 | GYYLH | 979 |
| | HCDR2 | WINPISGGTNYAQNFQD | 980 |
| | HCDR3 | LAYYYDSSAYRGAFDI | 981 |
| | HFR1 | QVLLVQSGAEVKKPGASVKVSCKAS | 982 |
| | | GYTFT | |
| | HFR2 | WVRQAPGQGLEWMG | 160 |
| | HFR3 | RVTMTRDTSIITAYMELSRLRSDDT | 983 |
| | | AVYYCAR | |
| | HFR4 | WGQGTMVTVSS | 44 |
| | LC | QSALTQPASVSGSPGQSITISCTGT | 984 |
| | | SSDVGGYNYVSWYQQHPGKAPKLMI | |
| | | YEVSNRPSGVSDRFSGSKSGNTASL | |
| | | TISGLQAEDEADYYCSSYTSSSTYV | |
| | | FGTGTKVTVLGQPKANPTVTLFPPS | |
| | | SEELQANKATLVCLISDFYPGAVTV | |
| | | AWKADGSPVKAGVETTKPSKQSNNK | |
| | | YAASS | |
| | LC | QSALTQPASVSGSPGQSITISCTGT | 985 |
| | variable | SSDVGGYNYVSWYQQHPGKAPKLMI | |
| | | YEVSNRPSGVSDRFSGSKSGNTASL | |
| | | TISGLQAEDEADYYCSSYTSSSTYV | |
| | | FGTGTKVTVL | |
| | LCDR1 | TGTSSDVGGYNYVS | 63 |
| | LCDR2 | EVSNRPS | 151 |
| | LCDR3 | SSYTSSSTYV | 986 |
| | LFR1 | QSALTQPASVSGSPGQSITISC | 66 |
| | LFR2 | WYQQHPGKAPKLMIY | 67 |
| | LFR3 | GVSDRFSGSKSGNTASLTISGLQAE | 987 |
| | | DEADYYC | |
| | LFR4 | FGTGTKVTVL | 18 |
| S564-152 | HC | QVQLVESGGGVVQPGRSLRLSCAAS | 988 |
| | | GFTFSYYGMHWVRQAPGKGLEWVAV | |
| | | IWYDGSNKHYADSVKGRFTISRDNS | |
| | | KNTLYLQMNSLRAEDTAVYYCAKNA | |
| | | APYCSGGSCYGTYFDYWGQGTLVTV | |
| | | SSASTKGPSVFPLAPSSKSTSGGTA | |
| | | ALGCLVKDYFPEPVTVSWNSGALTS | |
| | | GVHTFPAVLQSSG | |
| | HC | QVQLVESGGGVVQPGRSLRLSCAAS | 989 |
| | variable | GFTFSYYGMHWVRQAPGKGLEWVAV | |
| | | IWYDGSNKHYADSVKGRFTISRDNS | |
| | | KNTLYLQMNSLRAEDTAVYYCAKNA | |
| | | APYCSGGSCYGTYFDYWGQGTLVTV | |
| | | SS | |
| | HCDR1 | YYGMH | 990 |
| | HCDR2 | VIWYDGSNKHYADSVKG | 991 |
| | HCDR3 | NAAPYCSGGSCYGTYFDY | 992 |
| | HFR1 | QVQLVESGGGVVQPGRSLRLSCAAS | 144 |
| | | GFTFS | |
| | HFR2 | WVRQAPGKGLEWVA | 145 |
| | HFR3 | RFTISRDNSKNTLYLQMNSLRAEDT | 499 |
| | | AVYYCAK | |
| | HFR4 | WGQGTLVTVSS | 60 |
| | LC | DIQMTQSPSSLSASVGDRVTITCQA | 993 |
| | | SQDINNYLNWYQQKPGKAPKLLIYD | |
| | | ASNLETGVPSRFSGSGSGTDFTFTI | |
| | | SSLQPEDIATYYCQQYDNVPPHTFG | |
| | | QGTKLEIKRTVAAPSVFIFPPSDEQ | |
| | | LKSGTASVVCLLNNFYPREAKVQWK | |
| | | VDNALQSGNSQESVTEQDSKDSTYS | |
| | | LSSTLTLSKADYE | |
| | LC | DIQMTQSPSSLSASVGDRVTITCQA | 994 |
| | variable | SQDINNYLNWYQQKPGKAPKLLIYD | |
| | | ASNLETGVPSRFSGSGSGTDFTFTI | |
| | | SSLQPEDIATYYCQQYDNVPPHTFG | |
| | | QGTKLEIK | |
| | LCDR1 | QASQDINNYLN | 995 |
| | LCDR2 | DASNLET | 770 |
| | LCDR3 | QQYDNVPPHT | 996 |
| | LFR1 | DIQMTQSPSSLSASVGDRVTITC | 251 |
| | LFR2 | WYQQKPGKAPKLLIY | 252 |
| | LFR3 | GVPSRFSGSGSGTDFTFTISSLQPE | 997 |
| | | DIATYYC | |
| | LFR4 | FGQGTKLEIK | 380 |
| S564-218 | HC | [sequence omitted] | 998 |
| | | GGTFSSYAISWVRQAPGQGLEWMGG | |
| | | IIPIFGTAKYAQKFQGRVTITADES | |
| | | TSTAYMELSSLRSEDTAVYYCARGK | |
| | | DGYNPWGAFDIWGQGTMVTVSSGSA | |
| | | SAPTLFPLVSCENSPSDTSSV | |
| | HC | [sequence omitted] | 999 |
| | variable | GGTFSSYAISWVRQAPGQGLEWMGG | |
| | | IIPIFGTAKYAQKFQGRVTITADES | |
| | | TSTAYMELSSLRSEDTAVYYCARGK | |
| | | DGYNPWGAFDIWGQGTMVTVSS | |
| | HCDR1 | SYAIS | 308 |
| | HCDR2 | GIIPIFGTAKYAQKFQG | 1000 |
| | HCDR3 | GKDGYNPWGAFDI | 1001 |
| | HFR1 | [sequence omitted] | 310 |
| | | GGTFS | |
| | HFR2 | WVRQAPGQGLEWMG | 160 |
| | HFR3 | RVTITADESTSTAYMELSSLRSEDT | 1002 |
| | | AVYYCAR | |
| | HFR4 | WGQGTMVTVSS | 44 |
| | LC | QSALTQPPSASGSPGQSVTISCTGT | 1003 |
| | | SSDVGGYNYVSWYQQHPGKAPKLMI | |
| | | YEVSKRPSGVPDRFSGSKSGNTASL | |
| | | TVSGLQAEDEADYYCSSYAGSNNFG | |
| | | VFGGGTKLTVLGQPKAAPSVTLFPP | |
| | | SSEELQANKATLVCLISDFYPGAVT | |
| | | VAWKADSSPVKAGVETTTPSKQSNN | |
| | | KYAASSYLSLTPEQWKSH | |
| | LC | QSALTQPPSASGSPGQSVTISCTGT | 1004 |
| | variable | SSDVGGYNYVSWYQQHPGKAPKLMI | |
| | | YEVSKRPSGVPDRFSGSKSGNTASL | |
| | | TVSGLQAEDEADYYCSSYAGSNNFG | |
| | | VFGGGTKLTVL | |
| | LCDR1 | TGTSSDVGGYNYVS | 63 |
| | LCDR2 | EVSKRPS | 94 |
| | LCDR3 | SSYAGSNNFGV | 1005 |
| | LFR1 | QSALTQPPSASGSPGQSVTISC | 96 |
| | LFR2 | WYQQHPGKAPKLMIY | 67 |
| | LFR3 | GVPDRFSGSKSGNTASLTVSGLQAE | 1006 |
| | | DEADYYC | |
| | LFR4 | FGGGTKLTVL | 69 |
| S564-249 | HC | EVQLVESGGGLVQPGGSLRLSCVAS | 1007 |
| | | GFTFSDYAMHWVRQAPGKGLEYIAA | |
| | | ISSNGGRTYYADSVKDKFTISRDNS | |
| | | KNILYLHMGSLRAEDTAVYFCARDP | |
| | | QSWVTSTTAHFQHWGQGTLVTVSSA | |
| | | SPTSPKVFPLSLCSTQPDGNVVIAC | |
| | | LVQGFFPQEPLSVTWSESGQGVTAR | |
| | | NF | |
| | HC | EVQLVESGGGLVQPGGSLRLSCVAS | 1008 |
| | variable | GFTFSDYAMHWVRQAPGKGLEYIAA | |
| | | ISSNGGRTYYADSVKDKFTISRDNS | |
| | | KNILYLHMGSLRAEDTAVYFCARDP | |
| | | QSWVTSTTAHFQHWGQGTLVTVSS | |
| | HCDR1 | DYAMH | 1009 |
| | HCDR2 | AISSNGGRTYYADSVKD | 1010 |
| | HCDR3 | DPQSWVTSTTAHFQH | 1011 |
| | HFR1 | EVQLVESGGGLVQPGGSLRLSCVAS | 1012 |
| | | GFTFS | |
| | HFR2 | WVRQAPGKGLEYIA | 1013 |
| | HFR3 | KFTISRDNSKNILYLHMGSLRAEDT | 1014 |
| | | AVYFCAR | |
| | HFR4 | WGQGTLVTVSS | 60 |
| | LC | QSALTQPASVSGSPGQSITISCTGT | 1015 |
| | | SSDIGGYNYVSWYQQHPGKAPKLII | |
| | | SDVSNRPSGVSSRFSGSKSGNTASL | |
| | | TISGLQTEDEAHYYCSSFRSGITLG | |
| | | VFGGGTKLTVLGQPKAAPSVTLFPP | |
| | | SSEELQANKATLVCLISDFYPGAVT | |
| | | VAWKADSSPVKAGVETTTPSKQSNN | |
| | | KYAASS | |
| | LC | QSALTQPASVSGSPGQSITISCTGT | 1016 |
| | variable | SSDIGGYNYVSWYQQHPGKAPKLII | |
| | | SDVSNRPSGVSSRFSGSKSGNTASL | |
| | | TISGLQTEDEAHYYCSSFRSGITLG | |
| | | VFGGGTKLTVL | |
| | LCDR1 | TGTSSDIGGYNYVS | 1017 |
| | LCDR2 | DVSNRPS | 64 |
| | LCDR3 | SSFRSGITLGV | 1018 |
| | LFR1 | QSALTQPASVSGSPGQSITISC | 66 |
| | LFR2 | WYQQHPGKAPKLIIS | 1019 |
| | LFR3 | GVSSRFSGSKSGNTASLTISGLQTE | 1020 |
| | | DEAHYYC | |
| | LFR4 | FGGGTKLTVL | 69 |
| S564-265 | HC | [sequence omitted] | 1021 |
| | | GYTFTGYYMHWVRQAPGQGLEWMGW | |
| | | INPNSGAINYAQKFQGRVTMTRDTS | |
| | | ISTAYMELSSLRSDDTAVYYCARVG | |
| | | RFSIFGVELDNWGQGTLVTVSSAST | |
| | | KGPSVFPLAPSSKSTSGGTAALGCL | |
| | | VKDYFPEPVTVSWNSGALTSGVHTF | |
| | | PAVLQSSG | |
| | HC | [sequence omitted] | 1022 |
| | variable | GYTFTGYYMHWVRQAPGQGLEWMGW | |
| | | INPNSGAINYAQKFQGRVTMTRDTS | |
| | | ISTAYMELSSLRSDDTAVYYCARVG | |
| | | RFSIFGVELDNWGQGTLVTVSS | |
| | HCDR1 | GYYMH | 187 |
| | HCDR2 | WINPNSGAINYAQKFQG | 1023 |
| | HCDR3 | VGRFSIFGVELDN | 1024 |
| | HFR1 | [sequence omitted] | 190 |
| | | GYTFT | |
| | HFR2 | WVRQAPGQGLEWMG | 160 |
| | HFR3 | RVTMTRDTSISTAYMELSSLRSDDT | 1025 |
| | | AVYYCAR | |
| | HFR4 | WGQGTLVTVSS | 60 |
| | LC | QSALTQPPSASGSPGQSVTISCTGT | 1026 |
| | | SSDVGGYNFVSWYQQHPGKAPKLMI | |
| | | YEVSKRPSGVPDRFSGSKSGNTASL | |
| | | TVSGLQAEDEADYYCSSYGGSNNLI | |
| | | FGGGTRLTVLGQPKAAPSVTLFPPS | |
| | | SEELQANKATLVCLISDFYPGAVTV | |
| | | AWKADSSPVKAGVETTTPSKQSNNK | |
| | | YAASSYLSLTPEQWKSH | |
| | LC | QSALTQPPSASGSPGQSVTISCTGT | 1027 |
| | variable | SSDVGGYNFVSWYQQHPGKAPKLMI | |
| | | YEVSKRPSGVPDRFSGSKSGNTASL | |
| | | TVSGLQAEDEADYYCSSYGGSNNLI | |
| | | FGGGTRLTVL | |
| | LCDR1 | TGTSSDVGGYNFVS | 1028 |
| | LCDR2 | EVSKRPS | 94 |
| | LCDR3 | SSYGGSNNLI | 1029 |
| | LFR1 | QSALTQPPSASGSPGQSVTISC | 96 |
| | LFR2 | WYQQHPGKAPKLMIY | 67 |
| | LFR3 | GVPDRFSGSKSGNTASLTVSGLQAE | 1006 |
| | | DEADYYC | |
| | LFR4 | FGGGTRLTVL | 721 |
| S564-275 | HC | QVQLQESGPGLVKPSETLSLTCTVS | 1030 |
| | | GGSISSYYWSWIRQPPGKGLEWIGY | |
| | | IYYSGSTKYNPSLKSRVTISVDTSK | |
| | | KQFSLKLSSVTAADTAVYYCARHIK | |
| | | IGVVGGLTFDFWGQGTLVTVSSGSA | |
| | | SAPTLFPLVSCENSPSDTSSV | |
| | HC | QVQLQESGPGLVKPSETLSLTCTVS | 1031 |
| | variable | GGSISSYYWSWIRQPPGKGLEWIGY | |
| | | IYYSGSTKYNPSLKSRVTISVDTSK | |
| | | KQFSLKLSSVTAADTAVYYCARHIK | |
| | | IGVVGGLTFDFWGQGTLVTVSS | |
| | HCDR1 | SYYWS | 56 |
| | HCDR2 | YIYYSGSTKYNPSLKS | 333 |
| | HCDR3 | HIKIGVVGGLTFDF | 1032 |
| | HFR1 | QVQLQESGPGLVKPSETLSLTCTVS | 24 |
| | | GGSIS | |
| | HFR2 | WIRQPPGKGLEWIG | 7 |
| | HFR3 | RVTISVDTSKKQFSLKLSSVTAADT | 1033 |
| | | AVYYCAR | |
| | HFR4 | WGQGTLVTVSS | 60 |
| | LC | DIQMTQSPSSLSASIGDRVTITCRA | 1034 |
| | | SQSISTYLNWYQQKPGKAPKLLIYA | |
| | | ASSLQSGVPSRFSGSGSGADFTLTI | |
| | | SSLQPEDFATYYCQQSYSTPLTFGG | |
| | | GTKVEIKRTVAAPSVFIFPPSDEQL | |
| | | KSGTASVVCLLNNFYPREAKVQWKV | |
| | | DNA | |
| | LC | DIQMTQSPSSLSASIGDRVTITCRA | 1035 |
| | variable | SQSISTYLNWYQQKPGKAPKLLIYA | |
| | | ASSLQSGVPSRFSGSGSGADFTLTI | |
| | | SSLQPEDFATYYCQQSYSTPLTFGG | |
| | | GTKVEIK | |
| | LCDR1 | RASQSISTYLN | 1036 |
| | LCDR2 | AASSLQS | 249 |
| | LCDR3 | QQSYSTPLT | 1037 |
| | LFR1 | DIQMTQSPSSLSASIGDRVTITC | 1038 |
| | LFR2 | WYQQKPGKAPKLLIY | 252 |
| | LFR3 | GVPSRFSGSGSGADFTLTISSLQPE | 1039 |
| | | DFATYYC | |
| | LFR4 | FGGGTKVEIK | 85 |
| S564-287 | HC | [sequence omitted] | 1040 |
| | | GYTFTGYYMHWVRQAPGQGLEWMGW | |
| | | INPNSGGTNYAQKFQGRVTMTRDTS | |
| | | ISTAYMELSRLRCDDTAVYYCARAS | |
| | | TPYSSGSWADYWGQGTLVTVSSGSA | |
| | | SAPTLFPLVSCENSPSDTSSV | |
| | HC | [sequence omitted] | 1041 |
| | variable | GYTFTGYYMHWVRQAPGQGLEWMGW | |
| | | INPNSGGTNYAQKFQGRVTMTRDTS | |
| | | ISTAYMELSRLRCDDTAVYYCARAS | |
| | | TPYSSGSWADYWGQGTLVTVSS | |
| | HCDR1 | GYYMH | 187 |
| | HCDR2 | WINPNSGGTNYAQKFQG | 953 |
| | HCDR3 | ASTPYSSGSWADY | 1042 |
| | HFR1 | [sequence omitted] | 190 |
| | | GYTFT | |
| | HFR2 | WVRQAPGQGLEWMG | 160 |
| | HFR3 | RVTMTRDTSISTAYMELSRLRCDDT | 1043 |
| | | AVYYCAR | |
| | HFR4 | WGQGTLVTVSS | 60 |
| | LC | QSALTQPASVSGSPGQSITISCTGT | 1044 |
| | | SSDVGGYNYVSWYQQHPGKAPKLMI | |
| | | YDVSNRPSGVSNRFSGSKSGNTASL | |
| | | TISGLQAEDEADYYCSSYASSSTWV | |
| | | FGGGTKLTVLGQPKAAPSVTLFPPS | |
| | | SEELQANKATLVCLISDFYPGAVTV | |
| | | AWKADSSPVKAGVETTTPSKQSNNK | |
| | | YAASSYLSLT | |
| | LC | QSALTQPASVSGSPGQSITISCTGT | 1045 |
| | variable | SSDVGGYNYVSWYQQHPGKAPKLMI | |
| | | YDVSNRPSGVSNRFSGSKSGNTASL | |
| | | TISGLQAEDEADYYCSSYASSSTWV | |
| | | FGGGTKLTVL | |
| | LCDR1 | TGTSSDVGGYNYVS | 63 |
| | LCDR2 | DVSNRPS | 64 |
| | LCDR3 | SSYASSSTWV | 1046 |
| | LFR1 | QSALTQPASVSGSPGQSITISC | 66 |
| | LFR2 | WYQQHPGKAPKLMIY | 67 |
| | LFR3 | GVSNRFSGSKSGNTASLTISGLQAE | 68 |
| | | DEADYYC | |
| | LFR4 | FGGGTKLTVL | 69 |
| S166-32 | HC | QVQLVESGGGLVKPGGSLRLSCAAS | 1047 |
| | | GFTFSDYYMSWIRQAPGKGLEWVSY | |
| | | ISISDTTIYYADAVQGRFTMSRDNA | |
| | | KNSLYLQMNSLKAEDTAVYYCARAS | |
| | | PYCGGDCSFGNAFDIWGLGTMVTVS | |
| | | S | |
| | HC | QVQLVESGGGLVKPGGSLRLSCAAS | 1048 |
| | variable | GFTFSDYYMSWIRQAPGKGLEWVSY | |
| | | ISISDTTIYYADAVQGRFTMSRDNA | |
| | | KNSLYLQMNSLKAEDTAVYYCAR | |
| | HCDR1 | DYYMS | 1049 |
| | HCDR2 | YISISDTTIYYADAVQG | 1050 |
| | HCDR3 | ASPYCGGDCSFGNAFDI | 1051 |
| | HFR1 | QVQLVESGGGLVKPGGSLRLSCAAS | 1052 |
| | | GFTFS | |
| | HFR2 | WIRQAPGKGLEWVS | 1053 |
| | HFR3 | RFTMSRDNAKNSLYLQMNSLKAEDT | 1054 |
| | | AVYYCAR | |
| | HFR4 | WGLGTMVTVSS | 1055 |
| | LC | DIQMTQSPSTLSASVGDRVTITCRA | 1056 |
| | | SQSIFSWLAWYQQKPGKAPKLLIYD | |
| | | ASSLESGVPSRFSGSGSGTEFTLTI | |
| | | SSLQPDDFATYYCQQYNSYWTFGQG | |
| | | TKVEIK | |
| | LC | DIQMTQSPSTLSASVGDRVTITCRA | 1057 |
| | variable | SQSIFSWLAWYQQKPGKAPKLLIYD | |
| | | ASSLESGVPSRFSGSGSGTEFTLTI | |
| | | SSLQPDDFATYYCQQYNSY | |
| | LCDR1 | RASQSIFSWLA | 1058 |
| | LCDR2 | DASSLES | 387 |
| | LCDR3 | QQYNSYWT | 1059 |
| | LFR1 | DIQMTQSPSTLSASVGDRVTITC | 523 |
| | LFR2 | WYQQKPGKAPKLLIY | 252 |
| | LFR3 | GVPSRFSGSGSGTEFTLTISSLQPD | 524 |
| | | DFATYYC | |
| | LFR4 | FGQGTKVEIK | 53 |
| S305-223 | HC | QVQLVESGGGVVQPGRSLRLSCAAS | 1060 |
| | | GFTFRNFGMHWVRQAPGKGLEWVAF | |
| | | IWTAESDKFYADSVKGRFTVSRDNS | |
| | | KNTLYLEMNSLRAEDTAVYYCTKAM | |
| | | DVWGRGTTVTVSS | |
| | HC | QVQLVESGGGVVQPGRSLRLSCAAS | 1061 |
| | variable | GFTFRNFGMHWVRQAPGKGLEWVAF | |
| | | IWTAESDKFYADSVKGRFTVSRDNS | |
| | | KNTLYLEMNSLRAEDTAVYYCTK | |
| | HCDR1 | NFGMH | 1062 |
| | HCDR2 | FIWTAESDKFYADSVKG | 1063 |
| | HCDR3 | AMDV | 1064 |
| | HFR1 | QVQLVESGGGVVQPGRSLRLSCAAS | 1065 |
| | | GFTFR | |
| | HFR2 | WVRQAPGKGLEWVA | 145 |
| | HFR3 | RFTVSRDNSKNTLYLEMNSLRAEDT | 1066 |
| | | AVYYCTK | |
| | HFR4 | WGRGTTVTVSS | 1067 |
| | LC | EIVLTQSPATLSLSPGERATLSCRA | 1068 |
| | | SQSVSTSLAWYQQKCGQAPRLLIYD | |
| | | ASNRATGIPARFSGSGSGTDFTLTI | |
| | | SSLEPEDFAVYYCQQRGNWPFTFGP | |
| | | GTRVDIK | |
| | LC | EIVLTQSPATLSLSPGERATLSCRA | 1069 |
| | variable | SQSVSTSLAWYQQKCGQAPRLLIYD | |
| | | ASNRATGIPARFSGSGSGTDFTLTI | |
| | | SSLEPEDFAVYYCQQRGNWP | |
| | LCDR1 | RASQSVSTSLA | 1070 |
| | LCDR2 | DASNRAT | 441 |
| | LCDR3 | QQRGNWPFT | 1071 |
| | LFR1 | EIVLTQSPATLSLSPGERATLSC | 181 |
| | LFR2 | WYQQKCGQAPRLLIY | 1072 |
| | LFR3 | GIPARFSGSGSGTDFTLTISSLEPE | 183 |
| | | DFAVYYC | |
| | LFR4 | FGPGTRVDIK | 1073 |
| S305-399 | HC | QVQLVQSGAEVKKPGASVKVSCKVS | 1074 |
| | | GYTLTELSMHWVRQAPGKGLEWMGG | |
| | | FDPEDGETIYAQKFQGRVTMTEDTS | |
| | | TDTAYMELSSLRSEDTAVYYCATGG | |
| | | LGCSNGVCNNWFDPWGLGTLVTVSS | |
| | HC | QVQLVQSGAEVKKPGASVKVSCKVS | 1075 |
| | variable | GYTLTELSMHWVRQAPGKGLEWMGG | |
| | | FDPEDGETIYAQKFQGRVTMTEDTS | |
| | | TDTAYMELSSLRSEDTAVYYCAT | |
| | HCDR1 | ELSMH | 457 |
| | HCDR2 | GFDPEDGETIYAQKFQG | 458 |
| | HCDR3 | GGLGCSNGVCNNWFDP | 1076 |
| | HFR1 | QVQLVQSGAEVKKPGASVKVSCKVS | 1077 |
| | | GYTLT | |
| | HFR2 | WVRQAPGKGLEWMG | 42 |
| | HFR3 | RVTMTEDTSTDTAYMELSSLRSEDT | 1078 |
| | | AVYYCAT | |
| | HFR4 | WGLGTLVTVSS | 1079 |
| | LC | EIVMTQSPATLSVSPGERATLSCRA | 1080 |
| | | SQSITSNLAWYQQKPGQAPRLLIYG | |
| | | ASTRATGIPARFSGSGSGTEFTLTI | |
| | | SNLQSEDFAVYYCQQYNNWPLTFGQ | |
| | | GTKVEIK | |
| | LC | EIVMTQSPATLSVSPGERATLSCRA | 1081 |
| | variable | SQSITSNLAWYQQKPGQAPRLLIYG | |
| | | ASTRATGIPARFSGSGSGTEFTLTI | |
| | | SNLQSEDFAVYYCQQYNNWP | |
| | LCDR1 | RASQSITSNLA | 1082 |
| | LCDR2 | GASTRAT | 208 |
| | LCDR3 | QQYNNWPLT | 1083 |
| | LFR1 | EIVMTQSPATLSVSPGERATLSC | 210 |
| | LFR2 | WYQQKPGQAPRLLIY | 182 |
| | LFR3 | GIPARFSGSGSGTEFTLTISNLQSE | 1084 |
| | | DFAVYYC | |
| | LFR4 | FGQGTKVEIK | 53 |
| S305-1456 | HC | QVQLVQSGAEVKKPGASVKVSCKVS | 1085 |
| | | GYTLTELSMHWVRQAPGKGLEWMGG | |
| | | FDPEDAETIYAQKFQGRVTMTEDTS | |
| | | TDTAYMELSSLRSEDTAVYYCATGG | |
| | | FPVNSLYDILTGYLDYWGQGTLVTV | |
| | | SS | |
| | HC | QVQLVQSGAEVKKPGASVKVSCKVS | 1086 |
| | variable | GYTLTELSMHWVRQAPGKGLEWMGG | |
| | | FDPEDAETIYAQKFQGRVTMTEDTS | |
| | | TDTAYMELSSLRSEDTAVYYCAT | |
| | HCDR1 | ELSMH | 457 |
| | HCDR2 | GFDPEDAETIYAQKFQG | 1087 |
| | HCDR3 | GGFPVNSLYDILTGYLDY | 1088 |
| | HFR1 | QVQLVQSGAEVKKPGASVKVSCKVS | 1077 |
| | | GYTLT | |
| | HFR2 | WVRQAPGKGLEWMG | 42 |
| | HFR3 | RVTMTEDTSTDTAYMELSSLRSEDT | 1078 |
| | | AVYYCAT | |
| | HFR4 | WGQGTLVTVSS | 60 |
| | LC | EIVMTQSPATLSVSPGERATLSCRA | 1089 |
| | | SQNVSSNLAWYQQKPGQAPRLLIYG | |
| | | ASTRATGIPARFSGSGSGTEFTLTI | |
| | | SSLQSEDFAVYYCQQYNNWPHTFGP | |
| | | GTKVDIK | |
| | LC | EIVMTQSPATLSVSPGERATLSCRA | 1090 |
| | variable | SQNVSSNLAWYQQKPGQAPRLLIYG | |
| | | ASTRATGIPARFSGSGSGTEFTLTI | |
| | | SSLQSEDFAVYYCQQYNNWP | |
| | LCDR1 | RASQNVSSNLA | 1091 |
| | LCDR2 | GASTRAT | 208 |
| | LCDR3 | QQYNNWPHT | 1092 |
| | LFR1 | EIVMTQSPATLSVSPGERATLSC | 210 |
| | LFR2 | WYQQKPGQAPRLLIY | 182 |
| | LFR3 | GIPARFSGSGSGTEFTLTISSLQSE | 211 |
| | | DFAVYYC | |
| | LFR4 | FGPGTKVDIK | 443 |
| R125-306 | HC | QVQMVESGGGVVQPGGSLRLSCAVS | 1093 |
| | | GFTFNNFGMHWVRQAPGKGLEWVAF | |
| | | ISYEGSKKSYADSVKGRFTISRDSS | |
| | | KNTLYLQMNSLRPEDTSVYYCAKEL | |
| | | AIFMIYAGRYGLDVWGQGTTVTVSS | |
| | HC | QVQMVESGGGVVQPGGSLRLSCAVS | 1094 |
| | variable | GFTFNNFGMHWVRQAPGKGLEWVAF | |
| | | ISYEGSKKSYADSVKGRFTISRDSS | |
| | | KNTLYLQMNSLRPEDTSVYYCAK | |
| | HCDR1 | NFGMH | 1062 |
| | HCDR2 | FISYEGSKKSYADSVKG | 1095 |
| | HCDR3 | ELAIFMIYAGRYGLDV | 1096 |
| | HFR1 | QVQMVESGGGVVQPGGSLRLSCAVS | 1097 |
| | | GFTFN | |
| | HFR2 | WVRQAPGKGLEWVA | 145 |
| | HFR3 | RFTISRDSSKNTLYLQMNSLRPEDT | 1098 |
| | | SVYYCAK | |
| | HFR4 | WGQGTTVTVSS | 147 |
| | LC | SALTQPASVSGSPGQSITISCTGIY | 1099 |
| | | SDVDDYTSVSWYQQHPGKAPTLIIY | |
| | | DVTKRPSGVSNRFSASNSDNTASLT | |
| | | ISGLQAEDEAEYYCCSRGSATNSYV | |
| | | FGTGTKVTVL | |
| | LC | SALTQPASVSGSPGQSITISCTGIY | 1100 |
| | variable | SDVDDYTSVSWYQQHPGKAPTLIIY | |
| | | DVTKRPSGVSNRFSASNSDNTASLT | |
| | | ISGLQAEDEAEYYCCSRGS | |
| | LCDR1 | TGIYSDVDDYTSVS | 1101 |
| | LCDR2 | DVTKRPS | 1102 |
| | LCDR3 | CSRGSATNSYV | 1103 |
| | LFR1 | SALTQPASVSGSPGQSITISC | 1104 |
| | LFR2 | WYQQHPGKAPTLIIY | 1105 |
| | LFR3 | GVSNRFSASNSDNTASLTISGLQAE | 1106 |
| | | DEAEYYC | |
| | LFR4 | FGTGTKVTVL | 18 |
| R125-444 | HC | QVQLQESGPGLVKPSETLSLTCNVS | 1107 |
| | | GGSVKFFYWSWIRQPPGKGLEWIGY | |
| | | IYYSGSTNYNPSLKSRVTMSVDSPN | |
| | | NQFSLKLRSVTAADTAVYYCARVGR | |
| | | DCSSGICRTYDYYAMDVWGQGTTVT | |
| | | VSS | |
| | HC | QVQLQESGPGLVKPSETLSLTCNVS | 1108 |
| | variable | GGSVKFFYWSWIRQPPGKGLEWIGY | |
| | | IYYSGSTNYNPSLKSRVTMSVDSPN | |
| | | NQFSLKLRSVTAADTAVYYCAR | |
| | HCDR1 | FFYWS | 1109 |
| | HCDR2 | YIYYSGSTNYNPSLKS | 4 |
| | HCDR3 | VGRDCSSGICRTYDYYAMDV | 1110 |
| | HFR1 | QVQLQESGPGLVKPSETLSLTCNVS | 1111 |
| | | GGSVK | |
| | HFR2 | WIRQPPGKGLEWIG | 7 |
| | HFR3 | RVTMSVDSPNNQFSLKLRSVTAADT | 1112 |
| | | AVYYCAR | |
| | HFR4 | WGQGTTVTVSS | 147 |
| | LC | QSVLTQPPSLSGAPGQRVTISCTGS | 1113 |
| | | RSNIGAGYAVHWYQQLPGTAPKLLI | |
| | | SENTNGPSGVPDRFSGSKSDSSASL | |
| | | AITDLQAADEADYYCQSYDGSLSGW | |
| | | VFGGGTKLTVL | |
| | LC | QSVLTQPPSLSGAPGQRVTISCTGS | 1114 |
| | variable | RSNIGAGYAVHWYQQLPGTAPKLLI | |
| | | SENTNGPSGVPDRFSGSKSDSSASL | |
| | | AITDLQAADEADYYCQSYDGSLSG | |
| | LCDR1 | TGSRSNIGAGYAVH | 1115 |
| | LCDR2 | ENTNGPS | 1116 |
| | LCDR3 | QSYDGSLSGWV | 1117 |
| | LFR1 | QSVLTQPPSLSGAPGQRVTISC | 1118 |
| | LFR2 | WYQQLPGTAPKLLIS | 1119 |
| | LFR3 | GVPDRFSGSKSDSSASLAITDLQAA | 1120 |
| | | DEADYYC | |
| | LFR4 | FGGGTKLTVL | 69 |
| R3-428 | HC | QVTLKESGPVLVKPTETLTLTCTVS | 1121 |
| | | GFSPSNARMGVSWIRQPPGKALEWL | |
| | | AHVYSNDEKSYSTSLKRRLTISKDT | |
| | | SKRQVVLIMTNLDPADTGTYYCARA | |
| | | QDPRIRFGELLPVYFDNWGQGTLVT | |
| | | VSS | |
| | HC | QVTLKESGPVLVKPTETLTLTCTVS | 1122 |
| | variable | GFSPSNARMGVSWIRQPPGKALEWL | |
| | | AHVYSNDEKSYSTSLKRRLTISKDT | |
| | | SKRQVVLIMTNLDPADTGTYYCAR | |
| | HCDR1 | NARMGVS | 1123 |
| | HCDR2 | HVYSNDEKSYSTSLKR | 1124 |
| | HCDR3 | AQDPRIRFGELLPVYFDN | 1125 |
| | HFR1 | QVTLKESGPVLVKPTETLTLTCTVS | 1126 |
| | | GFSPS | |
| | HFR2 | WIRQPPGKALEWLA | 476 |
| | HFR3 | RLTISKDTSKRQVVLIMTNLDPADT | 1127 |
| | | GTYYCAR | |
| | HFR4 | WGQGTLVTVSS | 60 |
| | LC | DIQMTQSPSSLSAFVGDRVTISCRA | 1128 |
| | | SQSIVSYLNWYQQKPGKAPKLLLYS | |
| | | ASTLQSGVPSRFSGSGSGTDFTLTI | |
| | | SSLQPEDFATYYCQQGYTTPWTFGQ | |
| | | GTKVEIK | |
| | LC | DIQMTQSPSSLSAFVGDRVTISCRA | 1129 |
| | variable | SQSIVSYLNWYQQKPGKAPKLLLYS | |
| | | ASTLQSGVPSRFSGSGSGTDFTLTI | |
| | | SSLQPEDFATYYCQQGYTTP | |
| | LCDR1 | RASQSIVSYLN | 1130 |
| | LCDR2 | SASTLQS | 1131 |
| | LCDR3 | QQGYTTPWT | 1132 |
| | LFR1 | DIQMTQSPSSLSAFVGDRVTISC | 1133 |
| | LFR2 | WYQQKPGKAPKLLLY | 1134 |
| | LFR3 | GVPSRFSGSGSGTDFTLTISSLQPE | 253 |
| | | DFATYYC | |
| | LFR4 | FGQGTKVEIK | 53 |
| R478910- | HC | EVQLLESGGGLVLPGGSLRLSCAAS | 1135 |
| 171 | | GFSFSSYAMSWVRQAPGKGLEWVSG | |
| | | ISGRGTSTYYADSVKGRFTISRDNS | |
| | | KNTLYLQMNSLRAEDTAVYYCAKDR | |
| | | VSYGSPYYFDYWGQGTLVTVSS | |
| | HC | EVQLLESGGGLVLPGGSLRLSCAAS | 1136 |
| | variable | GFSFSSYAMSWVRQAPGKGLEWVSG | |
| | | ISGRGTSTYYADSVKGRFTISRDNS | |
| | | KNTLYLQMNSLRAEDTAVYYCAK | |
| | HCDR1 | SYAMS | 610 |
| | HCDR2 | GISGRGTSTYYADSVKG | 1137 |
| | HCDR3 | DRVSYGSPYYFDY | 1138 |
| | HFR1 | EVQLLESGGGLVLPGGSLRLSCAAS | 1139 |
| | | GFSFS | |
| | HFR2 | WVRQAPGKGLEWVS | 130 |
| | HFR3 | RFTISRDNSKNTLYLQMNSLRAEDT | 499 |
| | | AVYYCAK | |
| | HFR4 | WGQGTLVTVSS | 60 |
| | LC | DIVLTQSPATLSLSPGERATLSCGA | 1140 |
| | | SQSVSSNYLAWYQQEPGLAPRLLIY | |
| | | DASSRATGIPDRFSGSGSGTDFTLT | |
| | | ISRLEPEDFAVYYCQQYGSSSTFGQ | |
| | | GTRLEIK | |
| | LC | DIVLTQSPATLSLSPGERATLSCGA | 1141 |
| | variable | SQSVSSNYLAWYQQEPGLAPRLLIY | |
| | | DASSRATGIPDRFSGSGSGTDFTLT | |
| | | ISRLEPEDFAVYYCQQYGSS | |
| | LCDR1 | GASQSVSSNYLA | 1142 |
| | LCDR2 | DASSRAT | 1143 |
| | LCDR3 | QQYGSSST | 1144 |
| | LFR1 | DIVLTQSPATLSLSPGERATLSC | 1145 |
| | LFR2 | WYQQEPGLAPRLLIY | 1146 |
| | LFR3 | GIPDRFSGSGSGTDFTLTISRLEPE | 196 |
| | | DFAVYYC | |
| | LFR4 | FGQGTRLEIK | 701 |
| R478910-23 | HC | QVQLVESGGGVVQPGRSLRLSCAAS | 1147 |
| | | GFTFSSYGMHWVRQAPGKGLEWVAV | |
| | | IWYDGSNKYYADSVKGRFTISRDNS | |
| | | KNTLYLQMNSLRAEDTAVYYCARAP | |
| | | DYWGQGTLVTVSS | |
| | HC | QVQLVESGGGVVQPGRSLRLSCAAS | 1148 |
| | variable | GFTFSSYGMHWVRQAPGKGLEWVAV | |
| | | IWYDGSNKYYADSVKGRFTISRDNS | |
| | | KNTLYLQMNSLRAEDTAVYYCAR | |
| | HCDR1 | SYGMH | 141 |
| | HCDR2 | VIWYDGSNKYYADSVKG | 142 |
| | HCDR3 | APDY | 1149 |
| | HFR1 | QVQLVESGGGVVQPGRSLRLSCAAS | 144 |
| | | GFTFS | |
| | HFR2 | WVRQAPGKGLEWVA | 145 |
| | HFR3 | RFTISRDNSKNTLYLQMNSLRAEDT | 146 |
| | | AVYYCAR | |
| | HFR4 | WGQGTLVTVSS | 60 |
| | LC | AIQMTQSPSSLSASVGDRVTITCRA | 1150 |
| | | SQGIRNDLGWYQQKPGKAPKLLIYA | |
| | | ASSLQSGVPSRFSGSGSGTDFTLTI | |
| | | SSLQPEDFATYYCLQDYNYPYTFGQ | |
| | | GTKLEIK | |
| | LC | AIQMTQSPSSLSASVGDRVTITCRA | 1151 |
| | variable | SQGIRNDLGWYQQKPGKAPKLLIYA | |
| | | ASSLQSGVPSRFSGSGSGTDFTLTI | |
| | | SSLQPEDFATYYCLQDYNYP | |
| | LCDR1 | RASQGIRNDLG | 1152 |
| | LCDR2 | AASSLQS | 249 |
| | LCDR3 | LQDYNYPYT | 1153 |
| | LFR1 | AIQMTQSPSSLSASVGDRVTITC | 1154 |
| | LFR2 | WYQQKPGKAPKLLIY | 252 |
| | LFR3 | GVPSRFSGSGSGTDFTLTISSLQPE | 253 |
| | | DFATYYC | |
| | LFR4 | FGQGTKLEIK | 380 |
| R478910-25 | HC | EVQLLESGGGLVQPGGSLRLSCAVS | 1155 |
| | | GFTVSNYGLSWVRQGPGKGLEWVAA | |
| | | ISGSGGRTYYADSVKGRFTISRDNS | |
| | | KNTLFLQLNSLRAEDTAVYYCAKGR | |
| | | DELVVGATQDYWGQGTLVTVSS | |
| | HC | EVQLLESGGGLVQPGGSLRLSCAVS | 1156 |
| | variable | GFTVSNYGLSWVRQGPGKGLEWVAA | |
| | | ISGSGGRTYYADSVKGRFTISRDNS | |
| | | KNTLFLQLNSLRAEDTAVYYCAK | |
| | HCDR1 | NYGLS | 1157 |
| | HCDR2 | AISGSGGRTYYADSVKG | 1158 |
| | HCDR3 | GRDELVVGATQDY | 1159 |
| | HFR1 | EVQLLESGGGLVQPGGSLRLSCAVS | 1160 |
| | | GFTVS | |
| | HFR2 | WVRQGPGKGLEWVA | 1161 |
| | HFR3 | RFTISRDNSKNTLFLQLNSLRAEDT | 1162 |
| | | AVYYCAK | |
| | HFR4 | WGQGTLVTVSS | 60 |
| | LC | DIQMTQSPSSLSASVGDRVTITCRA | 1163 |
| | | NQNIRSYLNWYQQTPGKAPKLLIYA | |
| | | TSSLQSGVPSRFSGSGSGTQFTLTI | |
| | | SSLQPEDFATYYCQQSYSIPFDFGP | |
| | | GTKVDIK | |
| | LC | DIQMTQSPSSLSASVGDRVTITCRA | 1164 |
| | variable | NQNIRSYLNWYQQTPGKAPKLLIYA | |
| | | TSSLQSGVPSRFSGSGSGTQFTLTI | |
| | | SSLQPEDFATYYCQQSYSIP | |
| | LCDR1 | RANQNIRSYLN | 1165 |
| | LCDR2 | ATSSLQS | 1166 |
| | LCDR3 | QQSYSIPFD | 1167 |
| | LFR1 | DIQMTQSPSSLSASVGDRVTITC | 251 |
| | LFR2 | WYQQTPGKAPKLLIY | 453 |
| | LFR3 | GVPSRFSGSGSGTQFTLTISSLQPE | 1168 |
| | | DFATYYC | |
| | LFR4 | FGPGTKVDIK | 443 |
| R478910-3 | HC | EVQLLESGGDLVQPGGSLRLSCVAS | 1169 |
| | | GFTFRSYAMTWVRQAPGKGLEWVSS | |
| | | ISGSGGGTYYADSVKGRFTISRDNS | |
| | | KNTLFLQMNSLRAEDTAVYYCARGR | |
| | | EDWLLSLTYGYWGQGALVTVSS | |
| | HC | EVQLLESGGDLVQPGGSLRLSCVAS | 1170 |
| | variable | GFTFRSYAMTWVRQAPGKGLEWVSS | |
| | | ISGSGGGTYYADSVKGRFTISRDNS | |
| | | KNTLFLQMNSLRAEDTAVYYCAR | |
| | HCDR1 | SYAMT | 1171 |
| | HCDR2 | SISGSGGGTYYADSVKG | 1172 |
| | HCDR3 | GREDWLLSLTYGY | 1173 |
| | HFR1 | EVQLLESGGDLVQPGGSLRLSCVAS | 1174 |
| | | GFTFR | |
| | HFR2 | WVRQAPGKGLEWVS | 130 |
| | HFR3 | RFTISRDNSKNTLFLQMNSLRAEDT | 1175 |
| | | AVYYCAR | |
| | HFR4 | WGQGALVTVSS | 1176 |
| | LC | DIQMTQSPSSLSASVGDRVPITCRA | 1177 |
| | | SQSISSYLNWYQQRPGKAPKLLIYA | |
| | | ASSLQSGVPSRFSGSGSGTDFTLTI | |
| | | SSLQPEDFATYYCQQSYTIPPTFGG | |
| | | GTKVEIK | |
| | LC | DIQMTQSPSSLSASVGDRVPITCRA | 1178 |
| | variable | SQSISSYLNWYQQRPGKAPKLLIYA | |
| | | ASSLQSGVPSRFSGSGSGTDFTLTI | |
| | | SSLQPEDFATYYCQQSYTIPP | |
| | LCDR1 | RASQSISSYLN | 248 |
| | LCDR2 | AASSLQS | 249 |
| | LCDR3 | QQSYTIPPT | 1179 |
| | LFR1 | DIQMTQSPSSLSASVGDRVPITC | 1180 |
| | LFR2 | WYQQRPGKAPKLLIY | 1181 |
| | LFR3 | GVPSRFSGSGSGTDFTLTISSLQPE | 253 |
| | | DFATYYC | |
| | LFR4 | FGGGTKVEIK | 85 |
| R478910- | HC | [sequence omitted] | 1182 |
| 421 | | GFTFGSYWMNWVRQAPGKGLEWVAN | |
| | | INEDGSEKYYVDSVKGRFTISRDNA | |
| | | KNSLYLQMNSLRAEDTAVYYCARGH | |
| | | SLGEWGQGSPVTVSS | |
| | HC | [sequence omitted] | 1183 |
| | variable | GFTFGSYWMNWVRQAPGKGLEWVAN | |
| | | INEDGSEKYYVDSVKGRFTISRDNA | |
| | | KNSLYLQMNSLRAEDTAVYYCAR | |
| | HCDR1 | SYWMN | 1184 |
| | HCDR2 | NINEDGSEKYYVDSVKG | 1185 |
| | HCDR3 | GHSLGE | 1186 |
| | HFR1 | [sequence omitted] | 1187 |
| | | GFTFG | |
| | HFR2 | WVRQAPGKGLEWVA | 145 |
| | HFR3 | RFTISRDNAKNSLYLQMNSLRAEDT | 273 |
| | | AVYYCAR | |
| | HFR4 | WGQGSPVTVSS | 1188 |
| | LC | SSELTQDPAVSVALGQTVRITCQGD | 1189 |
| | | SLRSYSASWYQQKPGQAPVLVIYIK | |
| | | NKRPSGIPDRFSGSSSGNTASLTIT | |
| | | GAQAEDEADYYCNSRDSSGDHLVFG | |
| | | GGTKLTVL | |
| | LC | SSELTQDPAVSVALGQTVRITCQGD | 1190 |
| | variable | SLRSYSASWYQQKPGQAPVLVIYIK | |
| | | NKRPSGIPDRFSGSSSGNTASLTIT | |
| | | GAQAEDEADYYCNSRDSSGDHL | |
| | LCDR1 | QGDSLRSYSAS | 1191 |
| | LCDR2 | IKNKRPS | 1192 |
| | LCDR3 | NSRDSSGDHLV | 1193 |
| | LFR1 | SSELTQDPAVSVALGQTVRITC | 1194 |
| | LFR2 | WYQQKPGQAPVLVIY | 1195 |
| | LFR3 | GIPDRFSGSSSGNTASLTITGAQAE | 1196 |
| | | DEADYYC | |
| | LFR4 | FGGGTKLTVL | 69 |
| R478910-8 | HC | [sequence omitted] | 1197 |
| | | GFTFSSYSMNWVRQAPGKGLEWVSY | |
| | | ISSSSSTIYYADSVKGRFTISRDNA | |
| | | KNSLYLQMNSLRAEDTAVYYCARAN | |
| | | WNDMYFDLWGRGTLVTVSS | |
| | HC | [sequence omitted] | 1198 |
| | variable | GFTFSSYSMNWVRQAPGKGLEWVSY | |
| | | ISSSSSTIYYADSVKGRFTISRDNA | |
| | | KNSLYLQMNSLRAEDTAVYYCA | |
| | HCDR1 | SYSMN | 126 |
| | HCDR2 | YISSSSSTIYYADSVKG | 127 |
| | HCDR3 | ANWNDMYFDL | 1199 |
| | HFR1 | [sequence omitted] | 613 |
| | | GFTFS | |
| | HFR2 | WVRQAPGKGLEWVS | 130 |
| | HFR3 | RFTISRDNAKNSLYLQMNSLRAEDT | 273 |
| | | AVYYCAR | |
| | HFR4 | WGRGTLVTVSS | 9 |
| | LC | EIVLTQSPGTLSLSPGERATLSCRA | 1200 |
| | | SQSVSSSYLAWYQQKPGQAPRLLIY | |
| | | GASSRATGIPDRFSGSGSGTDFTLT | |
| | | ISRLEPEDFAVYYCQQYGSSPFGQG | |
| | | TKLEIK | |
| | LC | EIVLTQSPGTLSLSPGERATLSCRA | 1201 |
| | variable | SQSVSSSYLAWYQQKPGQAPRLLIY | |
| | | GASSRATGIPDRFSGSGSGTDFTLT | |
| | | ISRLEPEDFAVYYCQQYGSSP | |
| | LCDR1 | RASQSVSSSYLA | 338 |
| | LCDR2 | GASSRAT | 135 |
| | LCDR3 | QQYGSSP | 1202 |
| | LFR1 | EIVLTQSPGTLSLSPGERATLSC | 50 |
| | LFR2 | WYQQKPGQAPRLLIY | 182 |
| | LFR3 | GIPDRFSGSGSGTDFTLTISRLEPE | 196 |
| | | DFAVYYC | |
| | LFR4 | FGQGTKLEIK | 380 |
| S195-637 | HC | QVQLVESGGGVVQPGRSLRLSCAAS | 120 |
| | | GFTFSSNAMHWVRQAPGKGLEWVAV | |
| | | ISYDGDNKYYADSVKGRFTISRDNS | |
| | | KNTLYLQMNSLRTEDTAVYYCARSL | |
| | | GGNYFYGMDVWGQGTTVTVSS | |
| | HC | QVQLVESGGGVVQPGRSLRLSCAAS | 1204 |
| | variable | GFTFSSNAMHWVRQAPGKGLEWVAV | |
| | | ISYDGDNKYYADSVKGRFTISRDNS | |
| | | KNTLYLQMNSLRTEDTAVYYCA | |
| | HCDR1 | SNAMH | 1205 |
| | HCDR2 | VISYDGDNKYYADSVKG | 1206 |
| | HCDR3 | SLGGNYFYGMDV | 1207 |
| | HFR1 | QVQLVESGGGVVQPGRSLRLSCAAS | 144 |
| | | GFTFS | |
| | HFR2 | WVRQAPGKGLEWVA | 145 |
| | HFR3 | RFTISRDNSKNTLYLQMNSLRTEDT | 1208 |
| | | AVYYCAR | |
| | HFR4 | WGQGTTVTVSS | 147 |
| | LC | EIVLTQSPGTLSLSPGERATLSCRA | 1209 |
| | | SQSVSSSYLAWYQQKPGQAPRLLIY | |
| | | GASSRAAGIPDRFSGSGSGTDFTLT | |
| | | ISRLEPEDFAVYYCQQFGGSWTFGP | |
| | | GTKVEIK | |
| | LC | EIVLTQSPGTLSLSPGERATLSCRA | 1210 |
| | variable | SQSVSSSYLAWYQQKPGQAPRLLIY | |
| | | GASSRAAGIPDRFSGSGSGTDFTLT | |
| | | ISRLEPEDFAVYYCQQFGGS | |
| | LCDR1 | RASQSVSSSYLA | 338 |
| | LCDR2 | GASSRAA | 1211 |
| | LCDR3 | QQFGGSWT | 1212 |
| | LFR1 | EIVLTQSPGTLSLSPGERATLSC | 50 |
| | LFR2 | WYQQKPGQAPRLLIY | 182 |
| | LFR3 | GIPDRFSGSGSGTDFTLTISRLEPE | 196 |
| | | DFAVYYC | |
| | LFR4 | FGPGTKVEIK | 1213 |
| S380-1191 | HC | [sequence omitted] | 1214 |
| | | GFTFSGYIMNWVRQAPGKGLEWVSS | |
| | | ISGGSISISYAGSVKGRFTISRDNA | |
| | | KNSLYLQMNSLRAGDSAVYYCALTT | |
| | | FGVVTSYPSFDYWGQGTLVTVSS | |
| | HC | [sequence omitted] | 1215 |
| | variable | GFTFSGYIMNWVRQAPGKGLEWVSS | |
| | | ISGGSISISYAGSVKGRFTISRDNA | |
| | | KNSLYLQMNSLRAGDSAVYYCA | |
| | HCDR1 | GYIMN | 1216 |
| | HCDR2 | SISGGSISISYAGSVKG | 1217 |
| | HCDR3 | TTFGVVTSYPSFDY | 1218 |
| | HFR1 | [sequence omitted] | 613 |
| | | GFTFS | |
| | HFR2 | WVRQAPGKGLEWVS | 130 |
| | HFR3 | RFTISRDNAKNSLYLQMNSLRAGDS | 1219 |
| | | AVYYCAL | |
| | HFR4 | WGQGTLVTVSS | 60 |
| | LC | QSVLTQPPSVSGAPGQRVTISCTGS | 1220 |
| | | SSNIGAGYDVHWYQQLPGTAPKLLI | |
| | | YGNSNRPSGVPDRFSGSKSGTSASL | |
| | | AITGLQAEDEADYYCQSYDSSLSGY | |
| | | VFGGGTELTVL | |
| | LC | QSVLTQPPSVSGAPGQRVTISCTGS | 1221 |
| | variable | SSNIGAGYDVHWYQQLPGTAPKLLI | |
| | | YGNSNRPSGVPDRFSGSKSGTSASL | |
| | | AITGLQAEDEADYYCQSYDSSLSG | |
| | LCDR1 | TGSSSNIGAGYDVH | 673 |
| | LCDR2 | GNSNRPS | 350 |
| | LCDR3 | QSYDSSLSGYV | 1222 |
| | LFR1 | QSVLTQPPSVSGAPGQRVTISC | 537 |
| | LFR2 | WYQQLPGTAPKLLIY | 122 |
| | LFR3 | GVPDRFSGSKSGTSASLAITGLQAE | 539 |
| | | DEADYYC | |
| | LFR4 | FGGGTELTVL | 1223 |
| S451-101 | HC | [sequence omitted] | 1224 |
| | | GGTFSNYAISWVRQAPGPGLEWMGG | |
| | | IIPFLGIANYAQKFQGRVTITADKS | |
| | | TSTAYMELSSLRSEDTAVYYCARAP | |
| | | GYSSVGSTNYFDPWGQGTLVTVSS | |
| | HC | [sequence omitted] | 1225 |
| | variable | GGTFSNYAISWVRQAPGPGLEWMGG | |
| | | IIPFLGIANYAQKFQGRVTITADKS | |
| | | TSTAYMELSSLRSEDTAVYYCA | |
| | HCDR1 | NYAIS | 1226 |
| | HCDR2 | GIIPFLGIANYAQKFQG | 1227 |
| | HCDR3 | APGYSSVGSTNYFDP | 1228 |
| | HFR1 | [sequence omitted] | 310 |
| | | GGTFS | |
| | HFR2 | WVRQAPGPGLEWMG | 1229 |
| | HFR3 | RVTITADKSTSTAYMELSSLRSEDT | 161 |
| | | AVYYCAR | |
| | HFR4 | WGQGTLVTVSS | 60 |
| | LC | QSVLTQPPSVSGAPGQRVTISCTGS | 1230 |
| | | SSNIGAGYDVHWYQQLPGAAPKLLI | |
| | | YANSNRPSGVPDRFSGSKSGTSASL | |
| | | AITGLQAEDEADYYCQSYDSSLSGY | |
| | | VFGTGTKVTVL | |
| | LC | QSVLTQPPSVSGAPGQRVTISCTGS | 1231 |
| | variable | SSNIGAGYDVHWYQQLPGAAPKLLI | |
| | | YANSNRPSGVPDRFSGSKSGTSASL | |
| | | AITGLQAEDEADYYCQSYDSSLSG | |
| | LCDR1 | TGSSSNIGAGYDVH | 673 |
| | LCDR2 | ANSNRPS | 1232 |
| | LCDR3 | QSYDSSLSGYV | 1222 |
| | LFR1 | QSVLTQPPSVSGAPGQRVTISC | 537 |
| | LFR2 | WYQQLPGAAPKLLIY | 719 |
| | LFR3 | GVPDRFSGSKSGTSASLAITGLQAE | 539 |
| | | DEADYYC | |
| | LFR4 | FGTGTKVTVL | 18 |
| S451-11 | HC | QVQLQESGPGLVEPSQTLSLTCTVS | 1233 |
| | | GGSISSGGYYWSWIRQHPGKGLEWI | |
| | | GYISYSGGSTYYNPSLKSVVTISLD | |
| | | TSKNQFSLKLSSVTAADTAVYYCAR | |
| | | VSYGSGSFRFDYWGQGTLVTVSS | |
| | HC | QVQLQESGPGLVEPSQTLSLTCTVS | 1234 |
| | variable | GGSISSGGYYWSWIRQHPGKGLEWI | |
| | | GYISYSGGSTYYNPSLKSVVTISLD | |
| | | TSKNQFSLKLSSVTAADTAVYYCAR | |
| | HCDR1 | SGGYYWS | 1235 |
| | HCDR2 | YISYSGGSTYYNPSLKS | 1236 |
| | HCDR3 | VSYGSGSFRFDY | 1237 |
| | HFR1 | QVQLQESGPGLVEPSQTLSLTCTVS | 1238 |
| | | GGSIS | |
| | HFR2 | WIRQHPGKGLEWIG | 1239 |
| | HFR3 | VVTISLDTSKNQFSLKLSSVTAADT | 1240 |
| | | AVYYCAR | |
| | HFR4 | WGQGTLVTVSS | 60 |
| | LC | QSALTQPRSVSGSPGQSVTISCTGT | 1241 |
| | | SSDVGGYNYFSWYQHHAGKAPKLMI | |
| | | YDVSKRPSGVPDRFSGSKSGNTASL | |
| | | TISGLQAEDEADYYCCSYAGTYTWV | |
| | | FGGGTKLTVL | |
| | LC | QSALTQPRSVSGSPGQSVTISCTGT | 1242 |
| | variable | SSDVGGYNYFSWYQHHAGKAPKLMI | |
| | | YDVSKRPSGVPDRFSGSKSGNTASL | |
| | | TISGLQAEDEADYYCCSYAGTYT | |
| | LCDR1 | TGTSSDVGGYNYFS | 1243 |
| | LCDR2 | DVSKRPS | 592 |
| | LCDR3 | CSYAGTYTWV | 1244 |
| | LFR1 | QSALTQPRSVSGSPGQSVTISC | 594 |
| | LFR2 | WYQHHAGKAPKLMIY | 1245 |
| | LFR3 | GVPDRFSGSKSGNTASLTISGLQAE | 1246 |
| | | DEADYYC | |
| | LFR4 | FGGGTKLTVL | 69 |
| S451-1101 | HC | QVQLQESGPGLVKPSETLSLTCTVS | 1247 |
| | | GGSINSYSWSWIRQPAGKGLEWIGR | |
| | | ISTSGSTNNNPSLKSRVTMSVDTSK | |
| | | DQFSLKLTSVTAADTAVYYCARING | |
| | | AAAGTPFDYWGQGTLVTVSS | |
| | HC | QVQLQESGPGLVKPSETLSLTCTVS | 1248 |
| | variable | GGSINSYSWSWIRQPAGKGLEWIGR | |
| | | ISTSGSTNNNPSLKSRVTMSVDTSK | |
| | | DQFSLKLTSVTAADTAVYYCAR | |
| | HCDR1 | SYSWS | 1249 |
| | HCDR2 | RISTSGSTNNNPSLKS | 1250 |
| | HCDR3 | INGAAAGTPFDY | 1251 |
| | HFR1 | QVQLQESGPGLVKPSETLSLTCTVS | 324 |
| | | GGSIN | |
| | HFR2 | WIRQPAGKGLEWIG | 25 |
| | HFR3 | RVTMSVDTSKDQFSLKLTSVTAADT | 1252 |
| | | AVYYCAR | |
| | HFR4 | WGQGTLVTVSS | 60 |
| | LC | DIQMTQSPSSLSASVGDRVTITCRA | 1253 |
| | | SQSISNYLNWYQQKPGKAPKLLIYA | |
| | | ASSLQSGVPSRFSGSGSGTDFTLTI | |
| | | SSLQPEDFATYYCQQSYRTFGQGTK | |
| | | VEIK | |
| | LC | DIQMTQSPSSLSASVGDRVTITCRA | 1254 |
| | variable | SQSISNYLNWYQQKPGKAPKLLIYA | |
| | | ASSLQSGVPSRFSGSGSGTDFTLTI | |
| | | SSLQPEDFATYYCQQSYRT | |
| | LCDR1 | RASQSISNYLN | 570 |
| | LCDR2 | AASSLQS | 249 |
| | LCDR3 | QQSYRT | 1255 |
| | LFR1 | DIQMTQSPSSLSASVGDRVTITC | 251 |
| | LFR2 | WYQQKPGKAPKLLIY | 252 |
| | LFR3 | GVPSRFSGSGSGTDFTLTISSLQPE | 253 |
| | | DFATYYC | |
| | LFR4 | FGQGTKVEIK | 53 |
| S451-1439 | HC | [sequence omitted] | 1256 |
| | | GFTFDDFAMHWVRQAPGKGLEWVSG | |
| | | ISWNGGIIGYADSVKARFTISRDNA | |
| | | KNSLYLQMNSLRAEDTALYYCAKTR | |
| | | GDYDYVWGSRSSNYYFDYWGQGTLV | |
| | | TVSS | |
| | HC | [sequence omitted] | 1257 |
| | variable | GFTFDDFAMHWVRQAPGKGLEWVSG | |
| | | ISWNGGIIGYADSVKARFTISRDNA | |
| | | KNSLYLQMNSLRAEDTALYYCA | |
| | HCDR1 | DFAMH | 1258 |
| | HCDR2 | GISWNGGIIGYADSVKA | 1259 |
| | HCDR3 | TRGDYDYVWGSRSSNYYFDY | 1260 |
| | HFR1 | [sequence omitted] | 1261 |
| | | GFTFD | |
| | HFR2 | WVRQAPGKGLEWVS | 130 |
| | HFR3 | RFTISRDNAKNSLYLQMNSLRAEDT | 1262 |
| | | ALYYCAK | |
| | HFR4 | WGQGTLVTVSS | 60 |
| | LC | DIQMTQSPSSLSASVGDRVTITCQA | 1263 |
| | | SQDISNYLNWYQKKPGKAPKLLIYD | |
| | | ATNLETGVPSRFSGSGSGTEFTFTI | |
| | | SSLQPEDIATYYCQQYDNVPPITFG | |
| | | PGTKVDMK | |
| | LC | DIQMTQSPSSLSASVGDRVTITCQA | 1264 |
| | variable | SQDISNYLNWYQKKPGKAPKLLIYD | |
| | | ATNLETGVPSRFSGSGSGTEFTFTI | |
| | | SSLQPEDIATYYCQQYDNVPP | |
| | LCDR1 | QASQDISNYLN | 769 |
| | LCDR2 | DATNLET | 1265 |
| | LCDR3 | QQYDNVPPIT | 1266 |
| | LFR1 | DIQMTQSPSSLSASVGDRVTITC | 251 |
| | LFR2 | WYQKKPGKAPKLLIY | 1267 |
| | LFR3 | GVPSRFSGSGSGTEFTFTISSLQPE | 1268 |
| | | DIATYYC | |
| | LFR4 | FGPGTKVDMK | 1269 |
| S451-1451 | HC | QVQLVESGGGVVQPGRSLRLSCAAS | 1203 |
| | | GFTFSSNAMHWVRQAPGKGLEWVAV | |
| | | ISYDGDNKYYADSVKGRFTISRDNS | |
| | | KNTLYLQMNSLRTEDTAVYYCARSL | |
| | | GGNYFYGMDVWGQGTTVTVSS | |
| | HC | QVQLVESGGGVVQPGRSLRLSCAAS | 1204 |
| | variable | GFTFSSNAMHWVRQAPGKGLEWVAV | |
| | | ISYDGDNKYYADSVKGRFTISRDNS | |
| | | KNTLYLQMNSLRTEDTAVYYCA | |
| | HCDR1 | SNAMH | 1205 |
| | HCDR2 | VISYDGDNKYYADSVKG | 1206 |
| | HCDR3 | SLGGNYFYGMDV | 1207 |
| | HFR1 | QVQLVESGGGVVQPGRSLRLSCAAS | 144 |
| | | GFTFS | |
| | HFR2 | WVRQAPGKGLEWVA | 145 |
| | HFR3 | RFTISRDNSKNTLYLQMNSLRTEDT | 1208 |
| | | AVYYCAR | |
| | HFR4 | WGQGTTVTVSS | 147 |
| | LC | EIVLTQSPGTLSLSPGERATLSCRA | 1209 |
| | | SQSVSSSYLAWYQQKPGQAPRLLIY | |
| | | GASSRAAGIPDRFSGSGSGTDFTLT | |
| | | ISRLEPEDFAVYYCQQFGGSWTFGP | |
| | | GTKVEIK | |
| | LC | EIVLTQSPGTLSLSPGERATLSCRA | 1210 |
| | variable | SQSVSSSYLAWYQQKPGQAPRLLIY | |
| | | GASSRAAGIPDRFSGSGSGTDFTLT | |
| | | ISRLEPEDFAVYYCQQFGGS | |
| | LCDR1 | RASQSVSSSYLA | 338 |
| | LCDR2 | GASSRAA | 1211 |
| | LCDR3 | QQFGGSWT | 1212 |
| | LFR1 | EIVLTQSPGTLSLSPGERATLSC | 50 |
| | LFR2 | WYQQKPGQAPRLLIY | 182 |
| | LFR3 | GIPDRFSGSGSGTDFTLTISRLEPE | 196 |
| | | DFAVYYC | |
| | LFR4 | FGPGTKVEIK | 1213 |
| S451-1477 | HC | EPQLVESGGGLVQPGGSLRLSCAGS | 1270 |
| | | GFGFISYPMNWVRQAPGKGPEWISN | |
| | | IRTTAEGGTFYADSVKGRFTMSRDD | |
| | | GKTSIYLQMNSLRDEDTATYYCARD | |
| | | SSYGFDLWGQGTVVTVSS | |
| | HC | EPQLVESGGGLVQPGGSLRLSCAGS | 1271 |
| | variable | GFGFISYPMNWVRQAPGKGPEWISN | |
| | | IRTTAEGGTFYADSVKGRFTMSRDD | |
| | | GKTSIYLQMNSLRDEDTATYYCAR | |
| | HCDR1 | SYPMN | 1272 |
| | HCDR2 | NIRTTAEGGTFYADSVKG | 1273 |
| | HCDR3 | DSSYGFDL | 1274 |
| | HFR1 | EPQLVESGGGLVQPGGSLRLSCAGS | 1275 |
| | | GFGFI | |
| | HFR2 | WVRQAPGKGPEWIS | 1276 |
| | HFR3 | RFTMSRDDGKTSIYLQMNSLRDEDT | 1277 |
| | | ATYYCAR | |
| | HFR4 | WGQGTVVTVSS | 421 |
| | LC | QSALTQPRSVSGSPGQSVTISCTGT | 1278 |
| | | SSDVGGYNYVSWYQQRPGKAPELMI | |
| | | YHVSERPSGVPDRFSGSKSGNTASL | |
| | | TISRLQAEDEADYYCCSYAGSHFWV | |
| | | FGGGTKLTVL | |
| | LC | QSALTQPRSVSGSPGQSVTISCTGT | 1279 |
| | variable | SSDVGGYNYVSWYQQRPGKAPELMI | |
| | | YHVSERPSGVPDRFSGSKSGNTASL | |
| | | TISRLQAEDEADYYCCSYAGSH | |
| | LCDR1 | TGTSSDVGGYNYVS | 63 |
| | LCDR2 | HVSERPS | 1280 |
| | LCDR3 | CSYAGSHFWV | 1281 |
| | LFR1 | QSALTQPRSVSGSPGQSVTISC | 594 |
| | LFR2 | WYQQRPGKAPELMIY | 1282 |
| | LFR3 | GVPDRFSGSKSGNTASLTISRLQAE | 1283 |
| | | DEADYYC | |
| | LFR4 | FGGGTKLTVL | 69 |
| S451-1503 | HC | [sequence omitted] | 1182 |
| | | GFTFGSYWMNWVRQAPGKGLEWVAN | |
| | | INEDGSEKYYVDSVKGRFTISRDNA | |
| | | KNSLYLQMNSLRAEDTAVYYCARGH | |
| | | SLGEWGQGSPVTVSS | |
| | HC | [sequence omitted] | 1183 |
| | variable | GFTFGSYWMNWVRQAPGKGLEWVAN | |
| | | INEDGSEKYYVDSVKGRFTISRDNA | |
| | | KNSLYLQMNSLRAEDTAVYYCAR | |
| | HCDR1 | SYWMN | 1184 |
| | HCDR2 | NINEDGSEKYYVDSVKG | 1185 |
| | HCDR3 | GHSLGE | 1186 |
| | HFR1 | [sequence omitted] | 1187 |
| | | GFTFG | |
| | HFR2 | WVRQAPGKGLEWVA | 145 |
| | HFR3 | RFTISRDNAKNSLYLQMNSLRAEDT | 273 |
| | | AVYYCAR | |
| | HFR4 | WGQGSPVTVSS | 1188 |
| | LC | SSELTQDPAVSVALGQTVRITCQGD | 1189 |
| | | SLRSYSASWYQQKPGQAPVLVIYIK | |
| | | NKRPSGIPDRFSGSSSGNTASLTIT | |
| | | GAQAEDEADYYCNSRDSSGDHLVFG | |
| | | GGTKLTVL | |
| | LC | SSELTQDPAVSVALGQTVRITCQGD | 1190 |
| | variable | SLRSYSASWYQQKPGQAPVLVIYIK | |
| | | NKRPSGIPDRFSGSSSGNTASLTIT | |
| | | GAQAEDEADYYCNSRDSSGDHL | |
| | LCDR1 | QGDSLRSYSAS | 1191 |
| | LCDR2 | IKNKRPS | 1192 |
| | LCDR3 | NSRDSSGDHLV | 1193 |
| | LFR1 | SSELTQDPAVSVALGQTVRITC | 1194 |
| | LFR2 | WYQQKPGQAPVLVIY | 1195 |
| | LFR3 | GIPDRFSGSSSGNTASLTITGAQAE | 1196 |
| | | DEADYYC | |
| | LFR4 | FGGGTKLTVL | 69 |
| S451-1522 | HC | [sequence omitted] | 1214 |
| | | GFTFSGYIMNWVRQAPGKGLEWVSS | |
| | | ISGGSISISYAGSVKGRFTISRDNA | |
| | | KNSLYLQMNSLRAGDSAVYYCALTT | |
| | | FGVVTSYPSFDYWGQGTLVTVSS | |
| | HC | [sequence omitted] | 1215 |
| | variable | GFTFSGYIMNWVRQAPGKGLEWVSS | |
| | | ISGGSISISYAGSVKGRFTISRDNA | |
| | | KNSLYLQMNSLRAGDSAVYYCA | |
| | HCDR1 | GYIMN | 1216 |
| | HCDR2 | SISGGSISISYAGSVKG | 1217 |
| | HCDR3 | TTFGVVTSYPSFDY | 1218 |
| | HFR1 | [sequence omitted] | 613 |
| | | GFTFS | |
| | HFR2 | WVRQAPGKGLEWVS | 130 |
| | HFR3 | RFTISRDNAKNSLYLQMNSLRAGDS | 1219 |
| | | AVYYCAL | |
| | HFR4 | WGQGTLVTVSS | 60 |
| | LC | QSVLTQPPSVSGAPGQRVTISCTGS | 1220 |
| | | SSNIGAGYDVHWYQQLPGTAPKLLI | |
| | | YGNSNRPSGVPDRFSGSKSGTSASL | |
| | | AITGLQAEDEADYYCQSYDSSLSGY | |
| | | VFGGGTELTVL | |
| | LC | QSVLTQPPSVSGAPGQRVTISCTGS | 1221 |
| | variable | SSNIGAGYDVHWYQQLPGTAPKLLI | |
| | | YGNSNRPSGVPDRFSGSKSGTSASL | |
| | | AITGLQAEDEADYYCQSYDSSLSG | |
| | LCDR1 | TGSSSNIGAGYDVH | 673 |
| | LCDR2 | GNSNRPS | 350 |
| | LCDR3 | QSYDSSLSGYV | 1222 |
| | LFR1 | QSVLTQPPSVSGAPGQRVTISC | 537 |
| | LFR2 | WYQQLPGTAPKLLIY | 122 |
| | LFR3 | GVPDRFSGSKSGTSASLAITGLQAE | 539 |
| | | DEADYYC | |
| | LFR4 | FGGGTELTVL | 1223 |
| S451-1921 | HC | QVQLQESGPGLVKPSQTLSLTCTVS | 1284 |
| | | GGSISSGDYYWSWIRQPPGKGLEWL | |
| | | GYIYYSGSTFYNPSLKSRVTISVDT | |
| | | SKNQFSLRLTSVTAADTAVYFCARE | |
| | | ENKFNYGHHPLNGVFAYWGQGTLVT | |
| | | VSS | |
| | HC | QVQLQESGPGLVKPSQTLSLTCTVS | 1285 |
| | variable | GGSISSGDYYWSWIRQPPGKGLEWL | |
| | | GYIYYSGSTFYNPSLKSRVTISVDT | |
| | | SKNQFSLRLTSVTAADTAVYFCAR | |
| | HCDR1 | SGDYYWS | 72 |
| | HCDR2 | YIYYSGSTFYNPSLKS | 1286 |
| | HCDR3 | EENKFNYGHHPLNGVFAY | 1287 |
| | HFR1 | QVQLQESGPGLVKPSQTLSLTCTVS | 1288 |
| | | GGSIS | |
| | HFR2 | WIRQPPGKGLEWLG | 1289 |
| | HFR3 | RVTISVDTSKNQFSLRLTSVTAADT | 1290 |
| | | AVYFCAR | |
| | HFR4 | WGQGTLVTVSS | 60 |
| | LC | DIVMTQSPDSLAVSLGERATINCKS | 1291 |
| | | SQSVLYSPNNKNYLAWYQQKPGQPP | |
| | | NLLIYWASTRESGVPDRFSGSGSGT | |
| | | DFTLTINSLQAEDVAVYYCQQSYNT | |
| | | PRTFGQGTKVEIK | |
| | LC | DIVMTQSPDSLAVSLGERATINCKS | 1292 |
| | variable | SQSVLYSPNNKNYLAWYQQKPGQPP | |
| | | NLLIYWASTRESGVPDRFSGSGSGT | |
| | | DFTLTINSLQAEDVAVYYCQQSYNT | |
| | | P | |
| | LCDR1 | KSSQSVLYSPNNKNYLA | 1293 |
| | LCDR2 | WASTRES | 30 |
| | LCDR3 | QQSYNTPRT | 1294 |
| | LFR1 | DIVMTQSPDSLAVSLGERATINC | 32 |
| | LFR2 | WYQQKPGQPPNLLIY | 1295 |
| | LFR3 | GVPDRFSGSGSGTDFTLTINSLQAE | 1296 |
| | | DVAVYYC | |
| | LFR4 | FGQGTKVEIK | 53 |
| S451-337 | HC | QVTLKESGPVLVKPTETLTLTCTVS | 1297 |
| | | GFSLINARLGVSWIRQPPGKALEWL | |
| | | AHIFSDDEKSYSTSLKSRLTISKDT | |
| | | SKSQVVLTMTNMDPVDTATYYCARI | |
| | | SWPPYGSGTYYIKAFDIWGQGTLVT | |
| | | VSS | |
| | HC | QVTLKESGPVLVKPTETLTLTCTVS | 1298 |
| | variable | GFSLINARLGVSWIRQPPGKALEWL | |
| | | AHIFSDDEKSYSTSLKSRLTISKDT | |
| | | SKSQVVLTMTNMDPVDTATYYCARI | |
| | HCDR1 | NARLGVS | 1299 |
| | HCDR2 | HIFSDDEKSYSTSLKS | 1300 |
| | HCDR3 | ISWPPYGSGTYYIKAFDI | 1301 |
| | HFR1 | QVTLKESGPVLVKPTETLTLTCTVS | 1302 |
| | | GFSLI | |
| | HFR2 | WIRQPPGKALEWLA | 476 |
| | HFR3 | RLTISKDTSKSQVVLTMTNMDPVDT | 1303 |
| | | ATYYCAR | |
| | HFR4 | WGQGTLVTVSS | 60 |
| | LC | QSALTQPVSVSGSPGQSITISCTGT | 1304 |
| | | SSDVGGYNYVSWYQQHPGKAPKLMI | |
| | | SEVSNRPSGVSNRFSGSKSGNTASL | |
| | | TISGLQAEDEADYYCSSYASSSTLW | |
| | | VFGGGTKLTVL | |
| | LC | QSALTQPVSVSGSPGQSITISCTGT | 1305 |
| | variable | SSDVGGYNYVSWYQQHPGKAPKLMI | |
| | | SEVSNRPSGVSNRFSGSKSGNTASL | |
| | | TISGLQAEDEADYYCSSYASSSTL | |
| | LCDR1 | TGTSSDVGGYNYVS | 63 |
| | LCDR2 | EVSNRPS | 151 |
| | LCDR3 | SSYASSSTLWV | 1306 |
| | LFR1 | QSALTQPVSVSGSPGQSITISC | 1307 |
| | LFR2 | WYQQHPGKAPKLMIS | 1308 |
| | LFR3 | GVSNRFSGSKSGNTASLTISGLQAE | 68 |
| | | DEADYYC | |
| | LFR4 | FGGGTKLTVL | 69 |
| S451-650 | HC | QVQLQESGPGLVKPSETLSLTCTVS | 1309 |
| | | GASISNFYWSWIRQPPGKGLEWIGY | |
| | | IYYSGSTNYNPSLKSRVTMSLDTSK | |
| | | NQFSLNLSSVTAADTAVYYCARIPN | |
| | | FWFGELLFDFWGHGTLVTVSS | |
| | HC | QVQLQESGPGLVKPSETLSLTCTVS | 1310 |
| | variable | GASISNFYWSWIRQPPGKGLEWIGY | |
| | | IYYSGSTNYNPSLKSRVTMSLDTSK | |
| | | NQFSLNLSSVTAADTAVYYCAR | |
| | HCDR1 | NFYWS | 1311 |
| | HCDR2 | YIYYSGSTNYNPSLKS | 4 |
| | HCDR3 | IPNFWFGELLFDF | 1312 |
| | HFR1 | QVQLQESGPGLVKPSETLSLTCTVS | 1313 |
| | | GASIS | |
| | HFR2 | WIRQPPGKGLEWIG | 7 |
| | HFR3 | RVTMSLDTSKNQFSLNLSSVTAADT | 1314 |
| | | AVYYCAR | |
| | HFR4 | WGHGTLVTVSS | 1315 |
| | LC | EIVLTQSPGTLSLSPGERATLSCRA | 1316 |
| | | SQSVSSNYLAWYQQKPGQAPRLLIY | |
| | | GASSRATGIPDRFSGSGSGTDFTLT | |
| | | ISRLEPEDFAVYYCQQYGSSPPITF | |
| | | GQGTRLEIK | |
| | LC | EIVLTQSPGTLSLSPGERATLSCRA | 1317 |
| | variable | SQSVSSNYLAWYQQKPGQAPRLLIY | |
| | | GASSRATGIPDRFSGSGSGTDFTLT | |
| | | ISRLEPEDFAVYYCQQYGSSPP | |
| | LCDR1 | RASQSVSSNYLA | 816 |
| | LCDR2 | GASSRAT | 135 |
| | LCDR3 | QQYGSSPPIT | 1318 |
| | LFR1 | EIVLTQSPGTLSLSPGERATLSC | 50 |
| | LFR2 | WYQQKPGQAPRLLIY | 182 |
| | LFR3 | GIPDRFSGSGSGTDFTLTISRLEPE | 196 |
| | | DFAVYYC | |
| | LFR4 | FGQGTRLEIK | 701 |
| S626-362 | HC | [sequence omitted] | 1224 |
| | | GGTFSNYAISWVRQAPGPGLEWMGG | |
| | | IIPFLGIANYAQKFQGRVTITADKS | |
| | | TSTAYMELSSLRSEDTAVYYCARAP | |
| | | GYSSVGSTNYFDPWGQGTLVTVSS | |
| | HC | [sequence omitted] | 1225 |
| | variable | GGTFSNYAISWVRQAPGPGLEWMGG | |
| | | IIPFLGIANYAQKFQGRVTITADKS | |
| | | TSTAYMELSSLRSEDTAVYYCA | |
| | HCDR1 | NYAIS | 1226 |
| | HCDR2 | GIIPFLGIANYAQKFQG | 1227 |
| | HCDR3 | APGYSSVGSTNYFDP | 1228 |
| | HFR1 | [sequence omitted] | 310 |
| | | GGTFS | |
| | HFR2 | WVRQAPGPGLEWMG | 1229 |
| | HFR3 | RVTITADKSTSTAYMELSSLRSEDT | 161 |
| | | AVYYCAR | |
| | HFR4 | WGQGTLVTVSS | 60 |
| | LC | QSVLTQPPSVSGAPGQRVTISCTGS | 1230 |
| | | SSNIGAGYDVHWYQQLPGAAPKLLI | |
| | | YANSNRPSGVPDRFSGSKSGTSASL | |
| | | AITGLQAEDEADYYCQSYDSSLSGY | |
| | | VFGTGTKVTVL | |
| | LC | QSVLTQPPSVSGAPGQRVTISCTGS | 1231 |
| | variable | SSNIGAGYDVHWYQQLPGAAPKLLI | |
| | | YANSNRPSGVPDRFSGSKSGTSASL | |
| | | AITGLQAEDEADYYCQSYDSSLSG | |
| | LCDR1 | TGSSSNIGAGYDVH | 673 |
| | LCDR2 | ANSNRPS | 1232 |
| | LCDR3 | QSYDSSLSGYV | 1222 |
| | LFR1 | QSVLTQPPSVSGAPGQRVTISC | 537 |
| | LFR2 | WYQQLPGAAPKLLIY | 719 |
| | LFR3 | GVPDRFSGSKSGTSASLAITGLQAE | 539 |
| | | DEADYYC | |
| | LFR4 | FGTGTKVTVL | 18 |
| S626-651 | HC | [sequence omitted] | 1256 |
| | | GFTFDDFAMHWVRQAPGKGLEWVSG | |
| | | ISWNGGIIGYADSVKARFTISRDNA | |
| | | KNSLYLQMNSLRAEDTALYYCAKTR | |
| | | GDYDYVWGSRSSNYYFDYWGQGTLV | |
| | | TVSS | |
| | HC | [sequence omitted] | 1257 |
| | variable | GFTFDDFAMHWVRQAPGKGLEWVSG | |
| | | ISWNGGIIGYADSVKARFTISRDNA | |
| | | KNSLYLQMNSLRAEDTALYYCA | |
| | HCDR1 | DFAMH | 1258 |
| | HCDR2 | GISWNGGIIGYADSVKA | 1259 |
| | HCDR3 | TRGDYDYVWGSRSSNYYFDY | 1260 |
| | HFR1 | [sequence omitted] | 1261 |
| | | GFTFD | |
| | HFR2 | WVRQAPGKGLEWVS | 130 |
| | HFR3 | RFTISRDNAKNSLYLQMNSLRAEDT | 1262 |
| | | ALYYCAK | |
| | HFR4 | WGQGTLVTVSS | 60 |
| | LC | DIQMTQSPSSLSASVGDRVTITCQA | 1263 |
| | | SQDISNYLNWYQKKPGKAPKLLIYD | |
| | | ATNLETGVPSRFSGSGSGTEFTFTI | |
| | | SSLQPEDIATYYCQQYDNVPPITFG | |
| | | PGTKVDMK | |
| | LC | DIQMTQSPSSLSASVGDRVTITCQA | 1264 |
| | variable | SQDISNYLNWYQKKPGKAPKLLIYD | |
| | | ATNLETGVPSRFSGSGSGTEFTFTI | |
| | | SSLQPEDIATYYCQQYDNVPP | |
| | LCDR1 | QASQDISNYLN | 769 |
| | LCDR2 | DATNLET | 1265 |
| | LCDR3 | QQYDNVPPIT | 1266 |
| | LFR1 | DIQMTQSPSSLSASVGDRVTITC | 251 |
| | LFR2 | WYQKKPGKAPKLLIY | 1267 |
| | LFR3 | GVPSRFSGSGSGTEFTFTISSLQPE | 1268 |
| | | DIATYYC | |
| | LFR4 | FGPGTKVDMK | 1269 |
| S626-692 | HC | [sequence omitted] | 1319 |
| | | GYAFTSYDINWVRQATGQGLEWMGW | |
| | | MNPNSGDTFYAQKFQGRVTMTRSTS | |
| | | ISTAYMELSSLRSEDTAVYYCARGR | |
| | | VGADYVSGNRGYYYYYYMDVWGKGT | |
| | | TVTVSS | |
| | HC | [sequence omitted] | 1320 |
| | variable | GYAFTSYDINWVRQATGQGLEWMGW | |
| | | MNPNSGDTFYAQKFQGRVTMTRSTS | |
| | | ISTAYMELSSLRSEDTAVYYCARG | |
| | HCDR1 | SYDIN | 1321 |
| | HCDR2 | WMNPNSGDTFYAQKFQG | 1322 |
| | HCDR3 | GRVGADYVSGNRGYYYYYYMDV | 1323 |
| | HFR1 | [sequence omitted] | 1324 |
| | | GYAFT | |
| | HFR2 | WVRQATGQGLEWMG | 1325 |
| | HFR3 | RVTMTRSTSISTAYMELSSLRSEDT | 1326 |
| | | AVYYCAR | |
| | HFR4 | WGKGTTVTVSS | 670 |
| | LC | SSELTQDPAVSVALGQTVRITCQGE | 1327 |
| | | NLRSYYATWYQQKPGQAPILVIYGK | |
| | | NNRPSGIPDRFSGSSSGNTASLTIT | |
| | | GAQAEDEADYYCNSRDSSGNHLRVF | |
| | | GGGTKLTVL | |
| | LC | SSELTQDPAVSVALGQTVRITCQGE | 1328 |
| | variable | NLRSYYATWYQQKPGQAPILVIYGK | |
| | | NNRPSGIPDRFSGSSSGNTASLTIT | |
| | | GAQAEDEADYYCNSRDSSGNHL | |
| | LCDR1 | QGENLRSYYAT | 1329 |
| | LCDR2 | GKNNRPS | 1330 |
| | LCDR3 | NSRDSSGNHLRV | 1331 |
| | LFR1 | SSELTQDPAVSVALGQTVRITC | 1194 |
| | LFR2 | WYQQKPGQAPILVIY | 1332 |
| | LFR3 | GIPDRFSGSSSGNTASLTITGAQAE | 1196 |
| | | DEADYYC | |
| | LFR4 | FGGGTKLTVL | 69 |
| S626-7 | HC | [sequence omitted] | 1319 |
| | | GYAFTSYDINWVRQATGQGLEWMGW | |
| | | MNPNSGDTFYAQKFQGRVTMTRSTS | |
| | | ISTAYMELSSLRSEDTAVYYCARGR | |
| | | VGADYVSGNRGYYYYYYMDVWGKGT | |
| | | TVTVSS | |
| | HC | [sequence omitted] | 1320 |
| | variable | GYAFTSYDINWVRQATGQGLEWMGW | |
| | | MNPNSGDTFYAQKFQGRVTMTRSTS | |
| | | ISTAYMELSSLRSEDTAVYYCARG | |
| | HCDR1 | SYDIN | 1321 |
| | HCDR2 | WMNPNSGDTFYAQKFQG | 1322 |
| | HCDR3 | GRVGADYVSGNRGYYYYYYMDV | 1323 |
| | HFR1 | [sequence omitted] | 1324 |
| | | GYAFT | |
| | HFR2 | WVRQATGQGLEWMG | 1325 |
| | HFR3 | RVTMTRSTSISTAYMELSSLRSEDT | 1326 |
| | | AVYYCAR | |
| | HFR4 | WGKGTTVTVSS | 670 |
| | LC | SSELTQDPAVSVALGQTVRITCQGE | 1327 |
| | | NLRSYYATWYQQKPGQAPILVIYGK | |
| | | NNRPSGIPDRFSGSSSGNTASLTIT | |
| | | GAQAEDEADYYCNSRDSSGNHLRVF | |
| | | GGGTKLTVL | |
| | LC | SSELTQDPAVSVALGQTVRITCQGE | 1328 |
| | variable | NLRSYYATWYQQKPGQAPILVIYGK | |
| | | NNRPSGIPDRFSGSSSGNTASLTIT | |
| | | GAQAEDEADYYCNSRDSSGNHL | |
| | LCDR1 | QGENLRSYYAT | 1329 |
| | LCDR2 | GKNNRPS | 1330 |
| | LCDR3 | NSRDSSGNHLRV | 1331 |
| | LFR1 | SSELTQDPAVSVALGQTVRITC | 1194 |
| | LFR2 | WYQQKPGQAPILVIY | 1332 |
| | LFR3 | GIPDRFSGSSSGNTASLTITGAQAE | 1196 |
| | | DEADYYC | |
| | LFR4 | FGGGTKLTVL | 69 |
| S626-747 | HC | EPQLVESGGGLVQPGGSLRLSCAGS | 1270 |
| | | GFGFISYPMNWVRQAPGKGPEWISN | |
| | | IRTTAEGGTFYADSVKGRFTMSRDD | |
| | | GKTSIYLQMNSLRDEDTATYYCARD | |
| | | SSYGFDLWGQGTVVTVSS | |
| | HC | EPQLVESGGGLVQPGGSLRLSCAGS | 1271 |
| | variable | GFGFISYPMNWVRQAPGKGPEWISN | |
| | | IRTTAEGGTFYADSVKGRFTMSRDD | |
| | | GKTSIYLQMNSLRDEDTATYYCAR | |
| | HCDR1 | SYPMN | 1272 |
| | HCDR2 | NIRTTAEGGTFYADSVKG | 1273 |
| | HCDR3 | DSSYGFDL | 1274 |
| | HFR1 | EPQLVESGGGLVQPGGSLRLSCAGS | 1275 |
| | | GFGFI | |
| | HFR2 | WVRQAPGKGPEWIS | 1276 |
| | HFR3 | RFTMSRDDGKTSIYLQMNSLRDEDT | 1277 |
| | | ATYYCAR | |
| | HFR4 | WGQGTVVTVSS | 421 |
| | LC | QSALTQPRSVSGSPGQSVTISCTGT | 1278 |
| | | SSDVGGYNYVSWYQQRPGKAPELMI | |
| | | YHVSERPSGVPDRFSGSKSGNTASL | |
| | | TISRLQAEDEADYYCCSYAGSHFWV | |
| | | FGGGTKLTVL | |
| | LC | QSALTQPRSVSGSPGQSVTISCTGT | 1279 |
| | variable | SSDVGGYNYVSWYQQRPGKAPELMI | |
| | | YHVSERPSGVPDRFSGSKSGNTASL | |
| | | TISRLQAEDEADYYCCSYAGSH | |
| | LCDR1 | TGTSSDVGGYNYVS | 63 |
| | LCDR2 | HVSERPS | 1280 |
| | LCDR3 | CSYAGSHFWV | 1281 |
| | LFR1 | QSALTQPRSVSGSPGQSVTISC | 594 |
| | LFR2 | WYQQRPGKAPELMIY | 1282 |
| | LFR3 | GVPDRFSGSKSGNTASLTISRLQAE | 1283 |
| | | DEADYYC | |
| | LFR4 | FGGGTKLTVL | 69 |
| S626-75 | HC | QVQLQESGPGLVKPSQTLSLTCTVS | 1284 |
| | | GGSISSGDYYWSWIRQPPGKGLEWL | |
| | | GYIYYSGSTFYNPSLKSRVTISVDT | |
| | | SKNQFSLRLTSVTAADTAVYFCARE | |
| | | ENKFNYGHHPLNGVFAYWGQGTLVT | |
| | | VSS | |
| | HC | QVQLQESGPGLVKPSQTLSLTCTVS | 1285 |
| | variable | GGSISSGDYYWSWIRQPPGKGLEWL | |
| | | GYIYYSGSTFYNPSLKSRVTISVDT | |
| | | SKNQFSLRLTSVTAADTAVYFCAR | |
| | HCDR1 | SGDYYWS | 72 |
| | HCDR2 | YIYYSGSTFYNPSLKS | 1286 |
| | HCDR3 | EENKFNYGHHPLNGVFAY | 1287 |
| | HFR1 | QVQLQESGPGLVKPSQTLSLTCTVS | 1288 |
| | | GGSIS | |
| | HFR2 | WIRQPPGKGLEWLG | 1289 |
| | HFR3 | RVTISVDTSKNQFSLRLTSVTAADT | 1290 |
| | | AVYFCAR | |
| | HFR4 | WGQGTLVTVSS | 60 |
| | LC | DIVMTQSPDSLAVSLGERATINCKS | 1291 |
| | | SQSVLYSPNNKNYLAWYQQKPGQPP | |
| | | NLLIYWASTRESGVPDRFSGSGSGT | |
| | | DFTLTINSLQAEDVAVYYCQQSYNT | |
| | | PRTFGQGTKVEIK | |
| | LC | DIVMTQSPDSLAVSLGERATINCKS | 1292 |
| | variable | SQSVLYSPNNKNYLAWYQQKPGQPP | |
| | | NLLIYWASTRESGVPDRFSGSGSGT | |
| | | DFTLTINSLQAEDVAVYYCQQSYNT | |
| | | P | |
| | LCDR1 | KSSQSVLYSPNNKNYLA | 1293 |
| | LCDR2 | WASTRES | 30 |
| | LCDR3 | QQSYNTPRT | 1294 |
| | LFR1 | DIVMTQSPDSLAVSLGERATINC | 32 |
| | LFR2 | WYQQKPGQPPNLLIY | 1295 |
| | LFR3 | GVPDRFSGSGSGTDFTLTINSLQAE | 1296 |
| | | DVAVYYC | |
| | LFR4 | FGQGTKVEIK | 53 |
| S626-8 | HC | QVQLVESGGGVVQPGRSLRLSCVSS | 1333 |
| | | EVTFNRYTMHWVRQAPGKGLEWVAS | |
| | | ISFEGSVKTYVDSVKGRFTISRDDS | |
| | | KKTLFLQLNSLRDEDTAMYYCARGQ | |
| | | WPSGGDYWGRGTLVTVSS | |
| | HC | QVQLVESGGGVVQPGRSLRLSCVSS | 1334 |
| | variable | EVTFNRYTMHWVRQAPGKGLEWVAS | |
| | | ISFEGSVKTYVDSVKGRFTISRDDS | |
| | | KKTLFLQLNSLRDEDTAMYYCAR | |
| | HCDR1 | RYTMH | 1335 |
| | HCDR2 | SISFEGSVKTYVDSVKG | 1336 |
| | HCDR3 | GQWPSGGDY | 1337 |
| | HFR1 | QVQLVESGGGVVQPGRSLRLSCVSS | 1338 |
| | | EVTFN | |
| | HFR2 | WVRQAPGKGLEWVA | 145 |
| | HFR3 | RFTISRDDSKKTLFLQLNSLRDEDT | 1339 |
| | | AMYYCAR | |
| | HFR4 | WGRGTLVTVSS | 9 |
| | LC | DVVLTQSPLSLSVTLGQPASISCRS | 1340 |
| | | SQSLVYSDGSTYLNWFHQRPGQSPR | |
| | | RLIYKVSNRDSGVPDRFSGSGSGTD | |
| | | FTLKITRVAAEDVGVYYCMQGTYWP | |
| | | PTFGQGTKVEIK | |
| | LC | DVVLTQSPLSLSVTLGQPASISCRS | 134 |
| | variable | SQSLVYSDGSTYLNWFHQRPGQSPR | |
| | | RLIYKVSNRDSGVPDRFSGSGSGTD | |
| | | FTLKITRVAAEDVGVYYCMQGTYWP | |
| | | P | |
| | LCDR1 | RSSQSLVYSDGSTYLN | 1342 |
| | LCDR2 | KVSNRDS | 1343 |
| | LCDR3 | MQGTYWPPT | 1344 |
| | LFR1 | DVVLTQSPLSLSVTLGQPASISC | 1345 |
| | LFR2 | WFHQRPGQSPRRLIY | 1346 |
| | LFR3 | GVPDRFSGSGSGTDFTLKITRVAAE | 1347 |
| | | DVGVYYC | |
| | LFR4 | FGQGTKVEIK | 53 |
| S68-253 | HC | EVQLVQSGAEIKKPGESLKISCQGS | 1348 |
| | | GYIFTNNWIGWVRQQPGKGLEWMGI | |
| | | IYPGDSDARYSPSFQGHVSFSADKS | |
| | | INTAFLQWHSLKASDTAMYYCARIR | |
| | | RRGQGATAAFDIWGPGTKVTVSS | |
| | HC | EVQLVQSGAEIKKPGESLKISCQGS | 1349 |
| | variable | GYIFTNNWIGWVRQQPGKGLEWMGI | |
| | | IYPGDSDARYSPSFQGHVSFSADKS | |
| | | INTAFLQWHSLKASDTAMYYCAR | |
| | HCDR1 | NNWIG | 1350 |
| | HCDR2 | IIYPGDSDARYSPSFQG | 1351 |
| | HCDR3 | IRRRGQGATAAFDI | 1352 |
| | HFR1 | EVQLVQSGAEIKKPGESLKISCQGS | 1353 |
| | | GYIFT | |
| | HFR2 | WVRQQPGKGLEWMG | 1354 |
| | HFR3 | HVSFSADKSINTAFLQWHSLKASDT | 1355 |
| | | AMYYCAR | |
| | HFR4 | WGPGTKVTVSS | 1356 |
| | LC | DIVMTQSPDSLTVSLGERATINCKS | 1357 |
| | | SQNILTTSNNKNYLAWYQQKPGQPP | |
| | | KLLIYWASTRESGVPDRFSGSGSGT | |
| | | DFTLTISSLQAEDVAVYYCQQYFNS | |
| | | PPYTFGQGTKLEIK | |
| | LC | DIVMTQSPDSLTVSLGERATINCKS | 1358 |
| | variable | SQNILTTSNNKNYLAWYQQKPGQPP | |
| | | KLLIYWASTRESGVPDRFSGSGSGT | |
| | | DFTLTISSLQAEDVAVYYCQQYFNS | |
| | | PP | |
| | LCDR1 | KSSQNILTTSNNKNYLA | 1359 |
| | LCDR2 | WASTRES | 30 |
| | LCDR3 | QQYFNSPPYT | 1360 |
| | LFR1 | DIVMTQSPDSLTVSLGERATINC | 925 |
| | LFR2 | WYQQKPGQPPKLLIY | 33 |
| | LFR3 | GVPDRFSGSGSGTDFTLTISSLQAE | 293 |
| | | DVAVYYC | |
| | LFR4 | FGQGTKLEIK | 380 |
| S728-1502 | HC | [sequence omitted] | 136 |
| | | GYTFTGYYMHWVRQAPGQGLEWMGR | |
| | | INPNSGGTNYAQKFQGRVTMTRDTS | |
| | | ISTAYMELSRLRSDDTAVYYCARAH | |
| | | QPLLYGLGYYFDYWGQGTLVTVSS | |
| | HC | [sequence omitted] | 1362 |
| | variable | GYTFTGYYMHWVRQAPGQGLEWMGR | |
| | | INPNSGGTNYAQKFQGRVTMTRDTS | |
| | | ISTAYMELSRLRSDDTAVYYCAR | |
| | HCDR1 | GYYMH | 187 |
| | HCDR2 | RINPNSGGTNYAQKFQG | 585 |
| | HCDR3 | AHQPLLYGLGYYFDY | 1363 |
| | HFR1 | [sequence omitted] | 190 |
| | | GYTFT | |
| | HFR2 | WVRQAPGQGLEWMG | 160 |
| | HFR3 | RVTMTRDTSISTAYMELSRLRSDDT | 588 |
| | | AVYYCAR | |
| | HFR4 | WGQGTLVTVSS | 60 |
| | LC | QSALTQPASVSGSPGQSITISCTGT | 1364 |
| | | SSDVGGYNYVSWYQQHPGKAPKLMI | |
| | | YEVSNRPSGVSNRFSGSKSGNTASL | |
| | | TISGLQAEDEADYYCSSYTSSSTLV | |
| | | FGGGTKLTVL | |
| | LC | QSALTQPASVSGSPGQSITISCTGT | 1365 |
| | variable | SSDVGGYNYVSWYQQHPGKAPKLMI | |
| | | YEVSNRPSGVSNRFSGSKSGNTASL | |
| | | TISGLQAEDEADYYCSSYTSSSTL | |
| | LCDR1 | TGTSSDVGGYNYVS | 63 |
| | LCDR2 | EVSNRPS | 151 |
| | LCDR3 | SSYTSSSTLV | 1366 |
| | LFR1 | QSALTQPASVSGSPGQSITISC | 66 |
| | LFR2 | WYQQHPGKAPKLMIY | 67 |
| | LFR3 | GVSNRFSGSKSGNTASLTISGLQAE | 68 |
| | | DEADYYC | |
| | LFR4 | FGGGTKLTVL | 69 |
| S728-1789 | HC | [sequence omitted] | 1367 |
| | | GFTFSSYWMHWVRQAPGKGLVWVSR | |
| | | INSDGSSTSYADSVKGRFTISRDNA | |
| | | KNTLYLQMNSLRAEDTAVYYCARDR | |
| | | YSSLDYWGQGTLVTVSS | |
| | HC | [sequence omitted] | 1368 |
| | variable | GFTFSSYWMHWVRQAPGKGLVWVSR | |
| | | INSDGSSTSYADSVKGRFTISRDNA | |
| | | KNTLYLQMNSLRAEDTAVYYCAR | |
| | HCDR1 | SYWMH | 1369 |
| | HCDR2 | RINSDGSSTSYADSVKG | 1370 |
| | HCDR3 | DRYSSLDY | 1371 |
| | HFR1 | [sequence omitted] | 613 |
| | | GFTFS | |
| | HFR2 | WVRQAPGKGLVWVS | 1372 |
| | HFR3 | RFTISRDNAKNTLYLQMNSLRAEDT | 1373 |
| | | AVYYCAR | |
| | HFR4 | WGQGTLVTVSS | 60 |
| | LC | EIVLTQSPGTLSLSPGERATLSCRA | 1374 |
| | | SQSVSSSYLAWYQQKPGQAPRLLIY | |
| | | GASSRATGIPDRFSGSGSGTDFTLT | |
| | | ISRLEPEDFAVYYCQQYGSSPALTF | |
| | | GGGTKVEIK | |
| | LC | EIVLTQSPGTLSLSPGERATLSCRA | 1201 |
| | variable | SQSVSSSYLAWYQQKPGQAPRLLIY | |
| | | GASSRATGIPDRFSGSGSGTDFTLT | |
| | | ISRLEPEDFAVYYCQQYGSSP | |
| | LCDR1 | RASQSVSSSYLA | 338 |
| | LCDR2 | GASSRAT | 135 |
| | LCDR3 | QQYGSSPALT | 1375 |
| | LFR1 | EIVLTQSPGTLSLSPGERATLSC | 50 |
| | LFR2 | WYQQKPGQAPRLLIY | 182 |
| | LFR3 | GIPDRFSGSGSGTDFTLTISRLEPE | 196 |
| | | DFAVYYC | |
| | LFR4 | FGGGTKVEIK | 85 |
| S728-1806 | HC | [sequence omitted] | 1361 |
| | | GYTFTGYYMHWVRQAPGQGLEWMGR | |
| | | INPNSGGTNYAQKFQGRVTMTRDTS | |
| | | ISTAYMELSRLRSDDTAVYYCARAH | |
| | | QPLLYGLGYYFDYWGQGTLVTVSS | |
| | HC | [sequence omitted] | 1362 |
| | variable | GYTFTGYYMHWVRQAPGQGLEWMGR | |
| | | INPNSGGTNYAQKFQGRVTMTRDTS | |
| | | ISTAYMELSRLRSDDTAVYYCAR | |
| | HCDR1 | GYYMH | 187 |
| | HCDR2 | RINPNSGGTNYAQKFQG | 585 |
| | HCDR3 | AHQPLLYGLGYYFDY | 1363 |
| | HFR1 | [sequence omitted] | 190 |
| | | GYTFT | |
| | HFR2 | WVRQAPGQGLEWMG | 160 |
| | HFR3 | RVTMTRDTSISTAYMELSRLRSDDT | 588 |
| | | AVYYCAR | |
| | HFR4 | WGQGTLVTVSS | 60 |
| | LC | QSALTQPASVSGSPGQSITISCTGT | 1364 |
| | | SSDVGGYNYVSWYQQHPGKAPKLMI | |
| | | YEVSNRPSGVSNRFSGSKSGNTASL | |
| | | TISGLQAEDEADYYCSSYTSSSTLV | |
| | | FGGGTKLTVL | |
| | LC | QSALTQPASVSGSPGQSITISCTGT | 1365 |
| | variable | SSDVGGYNYVSWYQQHPGKAPKLMI | |
| | | YEVSNRPSGVSNRFSGSKSGNTASL | |
| | | TISGLQAEDEADYYCSSYTSSSTL | |
| | LCDR1 | TGTSSDVGGYNYVS | 63 |
| | LCDR2 | EVSNRPS | 151 |
| | LCDR3 | SSYTSSSTLV | 1366 |
| | LFR1 | QSALTQPASVSGSPGQSITISC | 66 |
| | LFR2 | WYQQHPGKAPKLMIY | 67 |
| | LFR3 | GVSNRFSGSKSGNTASLTISGLQAE | 68 |
| | | DEADYYC | |
| | LFR4 | FGGGTKLTVL | 69 |
| S728-1981 | HC | QVQLVQSGAEVKKPGASVKVSCKTS | 1376 |
| | | GYTFTNYFMHWVRQAPGQGLEWMGI | |
| | | INPSGGSASYAQKFQGRITMTSDTS | |
| | | TSTVYMELSSLRSEDTAVYYCARED | |
| | | IIVVVPARPLDYWGHGTLVTVSS | |
| | HC | QVQLVQSGAEVKKPGASVKVSCKTS | 1377 |
| | variable | GYTFTNYFMHWVRQAPGQGLEWMGI | |
| | | INPSGGSASYAQKFQGRITMTSDTS | |
| | | TSTVYMELSSLRSEDTAVYYCAR | |
| | HCDR1 | NYFMH | 1378 |
| | HCDR2 | IINPSGGSASYAQKFQG | 1379 |
| | HCDR3 | EDIIVVVPARPLDY | 1380 |
| | HFR1 | QVQLVQSGAEVKKPGASVKVSCKTS | 1381 |
| | | GYTFT | |
| | HFR2 | WVRQAPGQGLEWMG | 160 |
| | HFR3 | RITMTSDTSTSTVYMELSSLRSEDT | 1382 |
| | | AVYYCAR | |
| | HFR4 | WGHGTLVTVSS | 1315 |
| | LC | EIVLTQSPATLSLSPGERATLSCRA | 1383 |
| | | SQSFSNYLAWYQQKPGQAPRLLIYD | |
| | | ASNRATGIPARFSGSGSGTDFTLTI | |
| | | SSLEPEDFAVYYCQQRSNWPPLLTF | |
| | | GGGTKVEIK | |
| | LC | EIVLTQSPATLSLSPGERATLSCRA | 1384 |
| | variable | SQSFSNYLAWYQQKPGQAPRLLIYD | |
| | | ASNRATGIPARFSGSGSGTDFTLTI | |
| | | SSLEPEDFAVYYCQQRSNWPP | |
| | LCDR1 | RASQSFSNYLA | 1385 |
| | LCDR2 | DASNRAT | 441 |
| | LCDR3 | QQRSNWPPLLT | 1386 |
| | LFR1 | EIVLTQSPATLSLSPGERATLSC | 181 |
| | LFR2 | WYQQKPGQAPRLLIY | 182 |
| | LFR3 | GIPARFSGSGSGTDFTLTISSLEPE | 183 |
| | | DFAVYYC | |
| | LFR4 | FGGGTKVEIK | 85 |
| S728-2036 | HC | QVHLVQSGAEIRKPGASVMVSCKAS | 1387 |
| | | GYTFTDYYIHWVRQAPGQGLEWMGW | |
| | | INPNSGGTNYAQKFQGRVTMTRDTS | |
| | | IRTAYMELSRLRSDDAAVYYCAREG | |
| | | ISMLRGVRSWFDPWGQGTLVTVSS | |
| | HC | QVHLVQSGAEIRKPGASVMVSCKAS | 1388 |
| | variable | GYTFTDYYIHWVRQAPGQGLEWMGW | |
| | | INPNSGGTNYAQKFQGRVTMTRDTS | |
| | | IRTAYMELSRLRSDDAAVYYCAR | |
| | HCDR1 | DYYIH | 1389 |
| | HCDR2 | WINPNSGGTNYAQKFQG | 953 |
| | HCDR3 | EGISMLRGVRSWFDP | 1390 |
| | HFR1 | QVHLVQSGAEIRKPGASVMVSCKAS | 1391 |
| | | GYTFT | |
| | HFR2 | WVRQAPGQGLEWMG | 160 |
| | HFR3 | RVTMTRDTSIRTAYMELSRLRSDDA | 1392 |
| | | AVYYCAR | |
| | HFR4 | WGQGTLVTVSS | 60 |
| | LC | QSALTQPASVSGSPGQSITISCTGT | 1393 |
| | | SSDVGSYNLVSWYQQHPGKVPKLII | |
| | | YEVTKRPSGVSNRFSGSKSGNTASL | |
| | | TISGLQTEDEADYYCCSYAGFSAWV | |
| | | FGGGTKLTVL | |
| | LC | QSALTQPASVSGSPGQSITISCTGT | 1394 |
| | variable | SSDVGSYNLVSWYQQHPGKVPKLII | |
| | | YEVTKRPSGVSNRFSGSKSGNTASL | |
| | | TISGLQTEDEADYYCCSYAGFSA | |
| | LCDR1 | TGTSSDVGSYNLVS | 1395 |
| | LCDR2 | EVTKRPS | 1396 |
| | LCDR3 | CSYAGFSAWV | 1397 |
| | LFR1 | QSALTQPASVSGSPGQSITISC | 66 |
| | LFR2 | WYQQHPGKVPKLIIY | 1398 |
| | LFR3 | GVSNRFSGSKSGNTASLTISGLQTE | 1399 |
| | | DEADYYC | |
| | LFR4 | FGGGTKLTVL | 69 |
| S728-2111 | HC | [sequence omitted] | 1367 |
| | | GFTFSSYWMHWVRQAPGKGLVWVSR | |
| | | INSDGSSTSYADSVKGRFTISRDNA | |
| | | KNTLYLQMNSLRAEDTAVYYCARDR | |
| | | YSSLDYWGQGTLVTVSS | |
| | HC | [sequence omitted] | 1368 |
| | variable | GFTFSSYWMHWVRQAPGKGLVWVSR | |
| | | INSDGSSTSYADSVKGRFTISRDNA | |
| | | KNTLYLQMNSLRAEDTAVYYCAR | |
| | HCDR1 | SYWMH | 1369 |
| | HCDR2 | RINSDGSSTSYADSVKG | 1370 |
| | HCDR3 | DRYSSLDY | 1371 |
| | HFR1 | [sequence omitted] | 613 |
| | | GFTFS | |
| | HFR2 | WVRQAPGKGLVWVS | 1372 |
| | HFR3 | RFTISRDNAKNTLYLQMNSLRAEDT | 1373 |
| | | AVYYCAR | |
| | HFR4 | WGQGTLVTVSS | 60 |
| | LC | EIVLTQSPGTLSLSPGERATLSCRA | 1374 |
| | | SQSVSSSYLAWYQQKPGQAPRLLIY | |
| | | GASSRATGIPDRFSGSGSGTDFTLT | |
| | | ISRLEPEDFAVYYCQQYGSSPALTF | |
| | | GGGTKVEIK | |
| | LC | EIVLTQSPGTLSLSPGERATLSCRA | 1201 |
| | variable | SQSVSSSYLAWYQQKPGQAPRLLIY | |
| | | GASSRATGIPDRFSGSGSGTDFTLT | |
| | | ISRLEPEDFAVYYCQQYGSSP | |
| | LCDR1 | RASQSVSSSYLA | 338 |
| | LCDR2 | GASSRAT | 135 |
| | LCDR3 | QQYGSSPALT | 1375 |
| | LFR1 | EIVLTQSPGTLSLSPGERATLSC | 50 |
| | LFR2 | WYQQKPGQAPRLLIY | 182 |
| | LFR3 | GIPDRFSGSGSGTDFTLTISRLEPE | 196 |
| | | DFAVYYC | |
| | LFR4 | FGGGTKVEIK | 85 |
| S728-2148 | HC | QVQLVESGGGVVQPGRSLRLSCAAS | 1147 |
| | | GFTFSSYGMHWVRQAPGKGLEWVAV | |
| | | IWYDGSNKYYADSVKGRFTISRDNS | |
| | | KNTLYLQMNSLRAEDTAVYYCARAP | |
| | | DYWGQGTLVTVSS | |
| | HC | QVQLVESGGGVVQPGRSLRLSCAAS | 1148 |
| | variable | GFTFSSYGMHWVRQAPGKGLEWVAV | |
| | | IWYDGSNKYYADSVKGRFTISRDNS | |
| | | KNTLYLQMNSLRAEDTAVYYCAR | |
| | HCDR1 | SYGMH | 141 |
| | HCDR2 | VIWYDGSNKYYADSVKG | 142 |
| | HCDR3 | APDY | 1149 |
| | HFR1 | QVQLVESGGGVVQPGRSLRLSCAAS | 144 |
| | | GFTFS | |
| | HFR2 | WVRQAPGKGLEWVA | 145 |
| | HFR3 | RFTISRDNSKNTLYLQMNSLRAEDT | 146 |
| | | AVYYCAR | |
| | HFR4 | WGQGTLVTVSS | 60 |
| | LC | AIQMTQSPSSLSASVGDRVTITCRA | 1150 |
| | | SQGIRNDLGWYQQKPGKAPKLLIYA | |
| | | ASSLQSGVPSRFSGSGSGTDFTLTI | |
| | | SSLQPEDFATYYCLQDYNYPYTFGQ | |
| | | GTKLEIK | |
| | LC | AIQMTQSPSSLSASVGDRVTITCRA | 1151 |
| | variable | SQGIRNDLGWYQQKPGKAPKLLIYA | |
| | | ASSLQSGVPSRFSGSGSGTDFTLTI | |
| | | SSLQPEDFATYYCLQDYNYP | |
| | LCDR1 | RASQGIRNDLG | 1152 |
| | LCDR2 | AASSLQS | 249 |
| | LCDR3 | LQDYNYPYT | 1153 |
| | LFR1 | AIQMTQSPSSLSASVGDRVTITC | 1154 |
| | LFR2 | WYQQKPGKAPKLLIY | 252 |
| | LFR3 | GVPSRFSGSGSGTDFTLTISSLQPE | 253 |
| | | DFATYYC | |
| | LFR4 | FGQGTKLEIK | 380 |
| S728-656 | HC | EVQLLESGGGLVQPGGSLRLSCAAS | 1400 |
| | | GFTFSSYVLSWVRQAPGKGLEWVSA | |
| | | ISGSGGITYYADSVKGRFTISRDNS | |
| | | KNTLYLQMNSLRAEDTAVYYCAIRI | |
| | | TISGVFTPAWDSWGQGTLVTVSS | |
| | HC | EVQLLESGGGLVQPGGSLRLSCAAS | 1401 |
| | variable | GFTFSSYVLSWVRQAPGKGLEWVSA | |
| | | ISGSGGITYYADSVKGRFTISRDNS | |
| | | KNTLYLQMNSLRAEDTAVYYCA | |
| | HCDR1 | SYVLS | 1402 |
| | HCDR2 | AISGSGGITYYADSVKG | 1403 |
| | HCDR3 | RITISGVFTPAWDS | 1404 |
| | HFR1 | EVQLLESGGGLVQPGGSLRLSCAAS | 566 |
| | | GFTFS | |
| | HFR2 | WVRQAPGKGLEWVS | 130 |
| | HFR3 | RFTISRDNSKNTLYLQMNSLRAEDT | 1405 |
| | | AVYYCAI | |
| | HFR4 | WGQGTLVTVSS | 60 |
| | LC | DIQMTQSPSSLSASVGDRVTITCRA | 1406 |
| | | SQSISTYLNWYQQKPGKAPKLLIYA | |
| | | ASSLQSGVPSRFSGSGSGTDFTLTI | |
| | | SSLQPEDFATYFCQQSYSSPFTFGP | |
| | | GTKVDIK | |
| | LC | DIQMTQSPSSLSASVGDRVTITCRA | 1407 |
| | variable | SQSISTYLNWYQQKPGKAPKLLIYA | |
| | | ASSLQSGVPSRFSGSGSGTDFTLTI | |
| | | SSLQPEDFATYFCQQSYSSP | |
| | LCDR1 | RASQSISTYLN | 1036 |
| | LCDR2 | AASSLQS | 249 |
| | LCDR3 | QQSYSSPFT | 1408 |
| | LFR1 | DIQMTQSPSSLSASVGDRVTITC | 251 |
| | LFR2 | WYQQKPGKAPKLLIY | 252 |
| | LFR3 | GVPSRFSGSGSGTDFTLTISSLQPE | 1409 |
| | | DFATYFC | |
| | LFR4 | FGPGTKVDIK | 443 |
| S728-723 | HC | QVQLVQSGAEVKKPGASVKVSCKTS | 1376 |
| | | GYTFTNYFMHWVRQAPGQGLEWMGI | |
| | | INPSGGSASYAQKFQGRITMTSDTS | |
| | | TSTVYMELSSLRSEDTAVYYCARED | |
| | | IIVVVPARPLDYWGHGTLVTVSS | |
| | HC | QVQLVQSGAEVKKPGASVKVSCKTS | 1377 |
| | variable | GYTFTNYFMHWVRQAPGQGLEWMGI | |
| | | INPSGGSASYAQKFQGRITMTSDTS | |
| | | TSTVYMELSSLRSEDTAVYYCAR | |
| | HCDR1 | NYFMH | 1378 |
| | HCDR2 | IINPSGGSASYAQKFQG | 1379 |
| | HCDR3 | EDIIVVVPARPLDY | 1380 |
| | HFR1 | QVQLVQSGAEVKKPGASVKVSCKTS | 1381 |
| | | GYTFT | |
| | HFR2 | WVRQAPGQGLEWMG | 160 |
| | HFR3 | RITMTSDTSTSTVYMELSSLRSEDT | 1382 |
| | | AVYYCAR | |
| | HFR4 | WGHGTLVTVSS | 1315 |
| | LC | EIVLTQSPATLSLSPGERATLSCRA | 1383 |
| | | SQSFSNYLAWYQQKPGQAPRLLIYD | |
| | | ASNRATGIPARFSGSGSGTDFTLTI | |
| | | SSLEPEDFAVYYCQQRSNWPPLLTF | |
| | | GGGTKVEIK | |
| | LC | EIVLTQSPATLSLSPGERATLSCRA | 1384 |
| | variable | SQSFSNYLAWYQQKPGQAPRLLIYD | |
| | | ASNRATGIPARFSGSGSGTDFTLTI | |
| | | SSLEPEDFAVYYCQQRSNWPP | |
| | LCDR1 | RASQSFSNYLA | 1385 |
| | LCDR2 | DASNRAT | 441 |
| | LCDR3 | QQRSNWPPLLT | 1386 |
| | LFR1 | EIVLTQSPATLSLSPGERATLSC | 181 |
| | LFR2 | WYQQKPGQAPRLLIY | 182 |
| | LFR3 | GIPARFSGSGSGTDFTLTISSLEPE | 183 |
| | | DFAVYYC | |
| | LFR4 | FGGGTKVEIK | 85 |
| S728-826 | HC | [sequence omitted] | 1182 |
| | | GFTFGSYWMNWVRQAPGKGLEWVAN | |
| | | INEDGSEKYYVDSVKGRFTISRDNA | |
| | | KNSLYLQMNSLRAEDTAVYYCARGH | |
| | | SLGEWGQGSPVTVSS | |
| | HC | [sequence omitted] | 1183 |
| | variable | GFTFGSYWMNWVRQAPGKGLEWVAN | |
| | | INEDGSEKYYVDSVKGRFTISRDNA | |
| | | KNSLYLQMNSLRAEDTAVYYCAR | |
| | HCDR1 | SYWMN | 1184 |
| | HCDR2 | NINEDGSEKYYVDSVKG | 1185 |
| | HCDR3 | GHSLGE | 1186 |
| | HFR1 | [sequence omitted] | 1187 |
| | | GFTFG | |
| | HFR2 | WVRQAPGKGLEWVA | 145 |
| | HFR3 | RFTISRDNAKNSLYLQMNSLRAEDT | 273 |
| | | AVYYCAR | |
| | HFR4 | WGQGSPVTVSS | 1188 |
| | LC | SSELTQDPAVSVALGQTVRITCQGD | 1189 |
| | | SLRSYSASWYQQKPGQAPVLVIYIK | |
| | | NKRPSGIPDRFSGSSSGNTASLTIT | |
| | | GAQAEDEADYYCNSRDSSGDHLVFG | |
| | | GGTKLTVL | |
| | LC | SSELTQDPAVSVALGQTVRITCQGD | 1190 |
| | variable | SLRSYSASWYQQKPGQAPVLVIYIK | |
| | | NKRPSGIPDRFSGSSSGNTASLTIT | |
| | | GAQAEDEADYYCNSRDSSGDHL | |
| | LCDR1 | QGDSLRSYSAS | 1191 |
| | LCDR2 | IKNKRPS | 1192 |
| | LCDR3 | NSRDSSGDHLV | 1193 |
| | LFR1 | SSELTQDPAVSVALGQTVRITC | 1194 |
| | LFR2 | WYQQKPGQAPVLVIY | 1195 |
| | LFR3 | GIPDRFSGSSSGNTASLTITGAQAE | 1196 |
| | | DEADYYC | |
| | LFR4 | FGGGTKLTVL | 69 |
| S728-959 | HC | QVHLVQSGAEIRKPGASVMVSCKAS | 1387 |
| | | GYTFTDYYIHWVRQAPGQGLEWMGW | |
| | | INPNSGGTNYAQKFQGRVTMTRDTS | |
| | | IRTAYMELSRLRSDDAAVYYCAREG | |
| | | ISMLRGVRSWFDPWGQGTLVTVSS | |
| | HC | QVHLVQSGAEIRKPGASVMVSCKAS | 1388 |
| | variable | GYTFTDYYIHWVRQAPGQGLEWMGW | |
| | | INPNSGGTNYAQKFQGRVTMTRDTS | |
| | | IRTAYMELSRLRSDDAAVYYCAR | |
| | HCDR1 | DYYIH | 1389 |
| | HCDR2 | WINPNSGGTNYAQKFQG | 953 |
| | HCDR3 | EGISMLRGVRSWFDP | 1390 |
| | HFR1 | QVHLVQSGAEIRKPGASVMVSCKAS | 1391 |
| | | GYTFT | |
| | HFR2 | WVRQAPGQGLEWMG | 160 |
| | HFR3 | RVTMTRDTSIRTAYMELSRLRSDDA | 1392 |
| | | AVYYCAR | |
| | HFR4 | WGQGTLVTVSS | 60 |
| | LC | QSALTQPASVSGSPGQSITISCTGT | 1393 |
| | | SSDVGSYNLVSWYQQHPGKVPKLII | |
| | | YEVTKRPSGVSNRFSGSKSGNTASL | |
| | | TISGLQTEDEADYYCCSYAGFSAWV | |
| | | FGGGTKLTVL | |
| | LC | QSALTQPASVSGSPGQSITISCTGT | 1394 |
| | variable | SSDVGSYNLVSWYQQHPGKVPKLII | |
| | | YEVTKRPSGVSNRFSGSKSGNTASL | |
| | | TISGLQTEDEADYYCCSYAGFSA | |
| | LCDR1 | TGTSSDVGSYNLVS | 1395 |
| | LCDR2 | EVTKRPS | 1396 |
| | LCDR3 | CSYAGFSAWV | 1397 |
| | LFR1 | QSALTQPASVSGSPGQSITISC | 66 |
| | LFR2 | WYQQHPGKVPKLIIY | 1398 |
| | LFR3 | GVSNRFSGSKSGNTASLTISGLQTE | 1399 |
| | | DEADYYC | |
| | LFR4 | FGGGTKLTVL | 69 |
| S210-530 | HC | [sequence omitted] | 1410 |
| | | GYTFTGYFIHWVRQAPGQGLEYMGW | |
| | | INPNSAGTNYAQKFQGRVTMTGDTS | |
| | | ISTVYMELSRLRSDDTAMYYCARVF | |
| | | FDWLLPFDYWGQGTLVTVSS | |
| | HC | [sequence omitted] | 1411 |
| | variable | GYTFTGYFIHWVRQAPGQGLEYMGW | |
| | | INPNSAGTNYAQKFQGRVTMTGDTS | |
| | | ISTVYMELSRLRSDDTAMYYCAR | |
| | HCDR1 | GYFIH | 1412 |
| | HCDR2 | WINPNSAGTNYAQKFQG | 1413 |
| | HCDR3 | VFFDWLLPFDY | 1414 |
| | HFR1 | [sequence omitted] | 190 |
| | | GYTFT | |
| | HFR2 | WVRQAPGQGLEYMG | 1415 |
| | HFR3 | RVTMTGDTSISTVYMELSRLRSDDT | 1416 |
| | | AMYYCAR | |
| | HFR4 | WGQGTLVTVSS | 60 |
| | LC | QSALTQPASVSGSPGQSITISCTGT | 1417 |
| | | SSDVGSYNLVSWYQQHPGKAPKLMI | |
| | | YEVSKRPSGVSNRFSGSKSGNTASL | |
| | | TISGLQAEDEADYYCCSYAGSNYVF | |
| | | GTGTKVTVL | |
| | LC | QSALTQPASVSGSPGQSITISCTGT | 1418 |
| | variable | SSDVGSYNLVSWYQQHPGKAPKLMI | |
| | | YEVSKRPSGVSNRFSGSKSGNTASL | |
| | | TISGLQAEDEADYYCCSYAGS | |
| | LCDR1 | TGTSSDVGSYNLVS | 1395 |
| | LCDR2 | EVSKRPS | 94 |
| | LCDR3 | CSYAGSNYV | 1419 |
| | LFR1 | QSALTQPASVSGSPGQSITISC | 66 |
| | LFR2 | WYQQHPGKAPKLMIY | 67 |
| | LFR3 | GVSNRFSGSKSGNTASLTISGLQAE | 68 |
| | | DEADYYC | |
| | LFR4 | FGTGTKVTVL | 18 |
| S210-1129 | HC | EVQLLESGGGLVQPGGSLRLSCVAS | 1420 |
| | | RFTFSDYAMSWVRQPPGKGLEWVSS | |
| | | ISGSGGITYYADSVKGRFTISRDNS | |
| | | KNTLYLQIKSLRAEDTAIYYCAKER | |
| | | SNWNYVENFDYWGQGTLVTVSS | |
| | HC | EVQLLESGGGLVQPGGSLRLSCVAS | 1421 |
| | variable | RFTFSDYAMSWVRQPPGKGLEWVSS | |
| | | ISGSGGITYYADSVKGRFTISRDNS | |
| | | KNTLYLQIKSLRAEDTAIYYCAK | |
| | HCDR1 | DYAMS | 199 |
| | HCDR2 | SISGSGGITYYADSVKG | 1422 |
| | HCDR3 | ERSNWNYVENFDY | 1423 |
| | HFR1 | EVQLLESGGGLVQPGGSLRLSCVAS | 1424 |
| | | RFTFS | |
| | HFR2 | WVRQPPGKGLEWVS | 104 |
| | HFR3 | RFTISRDNSKNTLYLQIKSLRAEDT | 1425 |
| | | AIYYCAK | |
| | HFR4 | WGQGTLVTVSS | 60 |
| | LC | QTVVTQEPSLTVSPGGTVTLTCASS | 1426 |
| | | TGTVTSAFFPNWFQQKPGQAPRALI | |
| | | YSTTNKYSWTPARFSGSLLGGKAAL | |
| | | TLSGVQPEDEADYYCLLFYGGARPH | |
| | | VVFGGGTKLTVL | |
| | LC | QTVVTQEPSLTVSPGGTVTLTCASS | 1427 |
| | variable | TGTVTSAFFPNWFQQKPGQAPRALI | |
| | | YSTTNKYSWTPARFSGSLLGGKAAL | |
| | | TLSGVQPEDEADYYCLLFYGGA | |
| | LCDR1 | ASSTGTVTSAFFPN | 1428 |
| | LCDR2 | STTNKYS | 1429 |
| | LCDR3 | LLFYGGARPHVV | 1430 |
| | LFR1 | QTVVTQEPSLTVSPGGTVTLTC | 1431 |
| | LFR2 | WFQQKPGQAPRALIY | 1432 |
| | LFR3 | WTPARFSGSLLGGKAALTLSGVQPE | 1433 |
| | | DEADYYC | |
| | LFR4 | FGGGTKLTVL | 69 |
| S451-5 | HC | [sequence omitted] | 1434 |
| | | GASVSGYFWSWIRQPPGKGLEWIGE | |
| | | INRFGSTNYNPSLKSRVTLSVDTSR | |
| | | NQFSLKLGSVTAADTAMYYCARGSQ | |
| | | ANPLVRFFDSPVTAFDIWGQGTMVT | |
| | | VSS | |
| | HC | [sequence omitted] | 1435 |
| | variable | GASVSGYFWSWIRQPPGKGLEWIGE | |
| | | INRFGSTNYNPSLKSRVTLSVDTSR | |
| | | NQFSLKLGSVTAADTAMYYCARG | |
| | HCDR1 | GYFWS | 798 |
| | HCDR2 | EINRFGSTNYNPSLKS | 1436 |
| | HCDR3 | GSQANPLVRFFDSPVTAFDI | 1437 |
| | HFR1 | [sequence omitted] | 1438 |
| | | GASVS | |
| | HFR2 | WIRQPPGKGLEWIG | 7 |
| | HFR3 | RVTLSVDTSRNQFSLKLGSVTAADT | 1439 |
| | | AMYYCAR | |
| | HFR4 | WGQGTMVTVSS | 44 |
| | LC | EIVMTQSPATLSVSPGERATLSCRA | 1440 |
| | | SQSIKSNLAWYQQKPGQAPRLLIYG | |
| | | ASTRATGIPARFSGSGSGTEFTLTI | |
| | | SRLQSEDFALYYCQQYDNWPPYTFG | |
| | | QGTKLEIK | |
| | LC | EIVMTQSPATLSVSPGERATLSCRA | 1441 |
| | variable | SQSIKSNLAWYQQKPGQAPRLLIYG | |
| | | ASTRATGIPARFSGSGSGTEFTLTI | |
| | | SRLQSEDFALYYCQQYDNWPP | |
| | LCDR1 | RASQSIKSNLA | 1442 |
| | LCDR2 | GASTRAT | 208 |
| | LCDR3 | QQYDNWPPYT | 1443 |
| | LFR1 | EIVMTQSPATLSVSPGERATLSC | 210 |
| | LFR2 | WYQQKPGQAPRLLIY | 182 |
| | LFR3 | GIPARFSGSGSGTEFTLTISRLQSE | 1444 |
| | | DFALYYC | |
| | LFR4 | FGQGTKLEIK | 380 |
| S451-506 | HC | QITLKESGPTLVKPTQTLTLTCTFS | 1445 |
| | | GFSFTSSGVGVGWIRQPPGKAMEWL | |
| | | ALIYWDDDKRYSPSLKSRLTITKDT | |
| | | SKNQVVLKMTNMDPVDTATYYCARH | |
| | | TVATIVDYWGQGTLVTVSS | |
| | HC | QITLKESGPTLVKPTQTLTLTCTFS | 1446 |
| | variable | GFSFTSSGVGVGWIRQPPGKAMEWL | |
| | | ALIYWDDDKRYSPSLKSRLTITKDT | |
| | | SKNQVVLKMTNMDPVDTATYYCA | |
| | HCDR1 | SSGVGVG | 1447 |
| | HCDR2 | LIYWDDDKRYSPSLKS | 473 |
| | HCDR3 | HTVATIVDY | 1448 |
| | HFR1 | QITLKESGPTLVKPTQTLTLTCTFS | 1449 |
| | | GFSFT | |
| | HFR2 | WIRQPPGKAMEWLA | 1450 |
| | HFR3 | RLTITKDTSKNQVVLKMTNMDPVDT | 1451 |
| | | ATYYCAR | |
| | HFR4 | WGQGTLVTVSS | 60 |
| | LC | QSALTQPASVSGSPGQSITISCTGT | 1452 |
| | | SSDVGGYNYVSWYQQHPGKAPKLMI | |
| | | YEVSNRPSGVPDRFSGSKSGNTASL | |
| | | TISGLQAEDEADYYCGSYTTSSTPV | |
| | | VFGGGTKLTVL | |
| | LC | QSALTQPASVSGSPGQSITISCTGT | 1453 |
| | variable | SSDVGGYNYVSWYQQHPGKAPKLMI | |
| | | YEVSNRPSGVPDRFSGSKSGNTASL | |
| | | TISGLQAEDEADYYCGSYTTSST | |
| | LCDR1 | TGTSSDVGGYNYVS | 63 |
| | LCDR2 | EVSNRPS | 151 |
| | LCDR3 | GSYTTSSTPVV | 1454 |
| | LFR1 | QSALTQPASVSGSPGQSITISC | 66 |
| | LFR2 | WYQQHPGKAPKLMIY | 67 |
| | LFR3 | GVPDRFSGSKSGNTASLTISGLQAE | 1246 |
| | | DEADYYC | |
| | LFR4 | FGGGTKLTVL | 69 |
| S451-1140 | HC | EVQLVETGGGLIQPGGSLRLSCAAS | 1455 |
| | | GITVSSNYMNWVRLAPGKGLEWVSL | |
| | | IYSGGSTFYADSVKGRFTISRDNSK | |
| | | NTLYLQMNSLRAEDTAVYYCAREGL | |
| | | VGATTAFDYWGQGTLVTVSS | |
| | HC | EVQLVETGGGLIQPGGSLRLSCAAS | 1456 |
| | variable | GITVSSNYMNWVRLAPGKGLEWVSL | |
| | | IYSGGSTFYADSVKGRFTISRDNSK | |
| | | NTLYLQMNSLRAEDTAVYYCAR | |
| | HCDR1 | SNYMN | 1457 |
| | HCDR2 | LIYSGGSTFYADSVKG | 1458 |
| | HCDR3 | EGLVGATTAFDY | 1459 |
| | HFR1 | EVQLVETGGGLIQPGGSLRLSCAAS | 1460 |
| | | GITVS | |
| | HFR2 | WVRLAPGKGLEWVS | 1461 |
| | HFR3 | RFTISRDNSKNTLYLQMNSLRAEDT | 146 |
| | | AVYYCAR | |
| | HFR4 | WGQGTLVTVSS | 60 |
| | LC | DIQLTQSPSFLSASVGDRVTITCRA | 1462 |
| | | SQGISSYLAWYQLQPGKAPKLLIYA | |
| | | ASTLQSGVPSRFSGSGSGTEFTLTI | |
| | | SSLQPEDFATYYCQQLNGHPQGTFG | |
| | | QGTKVEIK | |
| | LC | DIQLTQSPSFLSASVGDRVTITCRA | 1463 |
| | variable | SQGISSYLAWYQLQPGKAPKLLIYA | |
| | | ASTLQSGVPSRFSGSGSGTEFTLTI | |
| | | SSLQPEDFATYYCQQLNGHP | |
| | LCDR1 | RASQGISSYLA | 1464 |
| | LCDR2 | AASTLQS | 1465 |
| | LCDR3 | QQLNGHPQGT | 1466 |
| | LFR1 | DIQLTQSPSFLSASVGDRVTITC | 1467 |
| | LFR2 | WYQLQPGKAPKLLIY | 1468 |
| | LFR3 | GVPSRFSGSGSGTEFTLTISSLQPE | 1469 |
| | | DFATYYC | |
| | LFR4 | FGQGTKVEIK | 53 |
| S451-1190 | HQ | QVTLRESGPALVKPTQTLTLTCTFS | 1470 |
| | | GFSLTTSGMCVSWIRQPPGKALEWL | |
| | | ARIDWDDDKYYSTSLKARLTISKDT | |
| | | SKNQVVLTMTNMDPVDTATYYCART | |
| | | SVGGTKYYFDYWGQGTLVTVSS | |
| | HC | QVTLRESGPALVKPTQTLTLTCTFS | 1471 |
| | variable | GFSLTTSGMCVSWIRQPPGKALEWL | |
| | | ARIDWDDDKYYSTSLKARLTISKDT | |
| | | SKNQVVLTMTNMDPVDTATYYCAR | |
| | HCDR1 | TSGMCVS | 1472 |
| | HCDR2 | RIDWDDDKYYSTSLKA | 1473 |
| | HCDR3 | TSVGGTKYYFDY | 1474 |
| | HFR1 | QVTLRESGPALVKPTQTLTLTCTFS | 1475 |
| | | GFSLT | |
| | HFR2 | WIRQPPGKALEWLA | 476 |
| | HFR3 | RLTISKDTSKNQVVLTMTNMDPVDT | 517 |
| | | ATYYCAR | |
| | HFR4 | WGQGTLVTVSS | 60 |
| | LC | QSVLTQPPSASGTPGQRVTISCSGS | 1476 |
| | | SSNIGRNTVNWYQQLPGTAPKLLIY | |
| | | SNNQRPSGVPDRFSGSKSGTSASLA | |
| | | ISGLQSEDEADYYCAAWDDSLNGGV | |
| | | FGGGTKLTVL | |
| | LC | QSVLTQPPSASGTPGQRVTISCSGS | 1477 |
| | variable | SSNIGRNTVNWYQQLPGTAPKLLIY | |
| | | SNNQRPSGVPDRFSGSKSGTSASLA | |
| | | ISGLQSEDEADYYCAAWDDSLNG | |
| | LCDR1 | SGSSSNIGRNTVN | 1478 |
| | LCDR2 | SNNQRPS | 119 |
| | LCDR3 | AAWDDSLNGGV | 1479 |
| | LFR1 | QSVLTQPPSASGTPGQRVTISC | 121 |
| | LFR2 | WYQQLPGTAPKLLIY | 122 |
| | LFR3 | GVPDRFSGSKSGTSASLAISGLQSE | 123 |
| | | DEADYYC | |
| | LFR4 | FGGGTKLTVL | 69 |
| S626-84 | HC | QLQLQESGPGLVKPSEALSLTCTVS | 1480 |
| | | GGSISTSNYYWGWIRQPPGKGLEWI | |
| | | GSIYYRGGTHYNPSLKTRVTISVDT | |
| | | SKNQFSLKLSSVTAADTAVYYCARH | |
| | | TYFYDIVGAAVWEPFDIWGQGTMVT | |
| | | VSS | |
| | HC | QLQLQESGPGLVKPSEALSLTCTVS | 1481 |
| | variable | GGSISTSNYYWGWIRQPPGKGLEWI | |
| | | GSIYYRGGTHYNPSLKTRVTISVDT | |
| | | SKNQFSLKLSSVTAADTAVYYCAR | |
| | HCDR1 | TSNYYWG | 1482 |
| | HCDR2 | SIYYRGGTHYNPSLKT | 1483 |
| | HCDR3 | HTYFYDIVGAAVWEPFDI | 1484 |
| | HFR1 | QLQLQESGPGLVKPSEALSLTCTVS | 1485 |
| | | GGSIS | |
| | HFR2 | WIRQPPGKGLEWIG | 7 |
| | HFR3 | RVTISVDTSKNQFSLKLSSVTAADT | 115 |
| | | AVYYCAR | |
| | HFR4 | WGQGTMVTVSS | 44 |
| | LC | EIVLTQSPGTLSLSPGERATLSCRA | 1486 |
| | | SQSVSSSYLAWYQQKPGQAPRLLIS | |
| | | DASSRATGIPDRFSGSGSGTDFTLT | |
| | | ISRLEPEDFAVYYCQQYGSSPPWTF | |
| | | GQGTKVEIK | |
| | LC | EIVLTQSPGTLSLSPGERATLSCRA | 1487 |
| | variable | SQSVSSSYLAWYQQKPGQAPRLLIS | |
| | | DASSRATGIPDRFSGSGSGTDFTLT | |
| | | ISRLEPEDFAVYYCQQYGSSPP | |
| | LCDR1 | RASQSVSSSYLA | 338 |
| | LCDR2 | DASSRAT | 1143 |
| | LCDR3 | QQYGSSPPWT | 1488 |
| | LFR1 | EIVLTQSPGTLSLSPGERATLSC | 50 |
| | LFR2 | WYQQKPGQAPRLLIS | 1489 |
| | LFR3 | GIPDRFSGSGSGTDFTLTISRLEPE | 196 |
| | | DFAVYYC | |
| | LFR4 | FGQGTKVEIK | 53 |
| S626-161 | HC | QLQLQESGPGLVKPSETLSLTCTVS | 1490 |
| | | GGSISSNNYYWGWIRQPPGKGLEWI | |
| | | GSIYYSGSTYYNPSLKSRVTMSVDT | |
| | | SKNQFSLKLSSVTAADTAVYHCARQ | |
| | | GPNYYDRSGYYYVGPFDIWGQGTMV | |
| | | TVSS | |
| | HC | QLQLQESGPGLVKPSETLSLTCTVS | 1491 |
| | variable | GGSISSNNYYWGWIRQPPGKGLEWI | |
| | | GSIYYSGSTYYNPSLKSRVTMSVDT | |
| | | SKNQFSLKLSSVTAADTAVYHCAR | |
| | HCDR1 | SNNYYWG | 1492 |
| | HCDR2 | SIYYSGSTYYNPSLKS | 243 |
| | HCDR3 | QGPNYYDRSGYYYVGPFDI | 1493 |
| | HFR1 | QLQLQESGPGLVKPSETLSLTCTVS | 245 |
| | | GGSIS | |
| | HFR2 | WIRQPPGKGLEWIG | 7 |
| | HFR3 | RVTMSVDTSKNQFSLKLSSVTAADT | 1494 |
| | | AVYHCAR | |
| | HFR4 | WGQGTMVTVSS | 44 |
| | LC | QSVLTQPPSVSAAPGQKVTISCSGS | 1495 |
| | | SSNIGNNSVSWYQHLPGTAPKLLIY | |
| | | ENNERPSGIPDRFSGSKSGTSATLG | |
| | | ITGLQTGDEADYYCETWDRSLSASF | |
| | | GTGTKVTVL | |
| | LC | QSVLTQPPSVSAAPGQKVTISCSGS | 1496 |
| | variable | SSNIGNNSVSWYQHLPGTAPKLLIY | |
| | | ENNERPSGIPDRFSGSKSGTSATLG | |
| | | ITGLQTGDEADYYCETWDRSLSA | |
| | LCDR1 | SGSSSNIGNNSVS | 1497 |
| | LCDR2 | ENNERPS | 1498 |
| | LCDR3 | ETWDRSLSAS | 1499 |
| | LFR1 | QSVLTQPPSVSAAPGQKVTISC | 1500 |
| | LFR2 | WYQHLPGTAPKLLIY | 1501 |
| | LFR3 | GIPDRFSGSKSGTSATLGITGLQTG | 1502 |
| | | DEADYYC | |
| | LFR4 | FGTGTKVTVL | 18 |
| S626-664 | HC | QVQLVQSGAEVKKPGASVKVSCRVS | 1503 |
| | | GYTFTGYYIHWVRQAPGQGLEWMGW | |
| | | INPNSGGTNYAQKFQGRVTMTRDTS | |
| | | ITTAYMELSRLRSDDTAVYYCARVP | |
| | | MILVVDHWGSYFDYWGQGTLVTVSS | |
| | HC | QVQLVQSGAEVKKPGASVKVSCRVS | 1504 |
| | variable | GYTFTGYYIHWVRQAPGQGLEWMGW | |
| | | INPNSGGTNYAQKFQGRVTMTRDTS | |
| | | ITTAYMELSRLRSDDTAVYYCAR | |
| | HCDR1 | GYYIH | 1505 |
| | HCDR2 | WINPNSGGTNYAQKFQG | 953 |
| | HCDR3 | VPMILVVDHWGSYFDY | 1506 |
| | HFR1 | QVQLVQSGAEVKKPGASVKVSCRVS | 1507 |
| | | GYTFT | |
| | HFR2 | WVRQAPGQGLEWMG | 160 |
| | HFR3 | RVTMTRDTSITTAYMELSRLRSDDT | 1508 |
| | | AVYYCAR | |
| | HFR4 | WGQGTLVTVSS | 60 |
| | LC | QSALTQPASVSGSPGQSITISCTGT | 1509 |
| | | SSDVGGYNYVSWYQQYPGKAPKLMI | |
| | | YDVSKRPSGVSNRFSGSKSGNTASL | |
| | | TISGLQAEDEADYYCCSYAGSSALV | |
| | | FGGGTKLTVL | |
| | LC | QSALTQPASVSGSPGQSITISCTGT | 1510 |
| | variable | SSDVGGYNYVSWYQQYPGKAPKLMI | |
| | | YDVSKRPSGVSNRFSGSKSGNTASL | |
| | | TISGLQAEDEADYYCCSYAGSSA | |
| | LCDR1 | TGTSSDVGGYNYVS | 63 |
| | LCDR2 | DVSKRPS | 592 |
| | LCDR3 | CSYAGSSALV | 1511 |
| | LFR1 | QSALTQPASVSGSPGQSITISC | 66 |
| | LFR2 | WYQQYPGKAPKLMIY | 1512 |
| | LFR3 | GVSNRFSGSKSGNTASLTISGLQAE | 68 |
| | | DEADYYC | |
| | LFR4 | FGGGTKLTVL | 69 |
| S728-209 | HC | QITLKESGPTLVKPTQTLTLTCTLS | 1513 |
| | | GFSLSTSGVSVGWIRQPPGKALEWL | |
| | | AVIFWDDDKRYNPSLKSRLTIAKDT | |
| | | SKSQVVLTMTNLDPVDTGTYYCVSG | |
| | | SSYYYYYYMDVWGKGTTVTVSS | |
| | HC | QITLKESGPTLVKPTQTLTLTCTLS | 1514 |
| | variable | GFSLSTSGVSVGWIRQPPGKALEWL | |
| | | AVIFWDDDKRYNPSLKSRLTIAKDT | |
| | | SKSQVVLTMTNLDPVDTGTYYCV | |
| | HCDR1 | TSGVSVG | 1515 |
| | HCDR2 | VIFWDDDKRYNPSLKS | 1516 |
| | HCDR3 | GSSYYYYYYMDV | 1517 |
| | HFR1 | QITLKESGPTLVKPTQTLTLTCTLS | 1518 |
| | | GFSLS | |
| | HFR2 | WIRQPPGKALEWLA | 476 |
| | HFR3 | RLTIAKDTSKSQVVLTMTNLDPVDT | 1519 |
| | | GTYYCVS | |
| | HFR4 | WGKGTTVTVSS | 670 |
| | LC | DIQMTQSPSSVSASIGDRVTITCRA | 1520 |
| | | SQDISTWLAWYQQKPGRAPNLLIYG | |
| | | ASSLQSGVPSRFSGSGSGTDFTLTI | |
| | | SSLQPEDFATYYCQQATSFPLTFGG | |
| | | GTKVEIK | |
| | LC | DIQMTQSPSSVSASIGDRVTITCRA | 1521 |
| | variable | SQDISTWLAWYQQKPGRAPNLLIYG | |
| | | ASSLQSGVPSRFSGSGSGTDFTLTI | |
| | | SSLQPEDFATYYCQQATSFP | |
| | LCDR1 | RASQDISTWLA | 1522 |
| | LCDR2 | GASSLQS | 1523 |
| | LCDR3 | QQATSFPLT | 1524 |
| | LFR1 | DIQMTQSPSSVSASIGDRVTITC | 1525 |
| | LFR2 | WYQQKPGRAPNLLIY | 1526 |
| | LFR3 | GVPSRFSGSGSGTDFTLTISSLQPE | 253 |
| | | DFATYYC | |
| | LFR4 | FGGGTKVEIK | 85 |
| S728-369 | HC | QVQLQESGPGLVKPSQTLSLTCSVS | 1527 |
| | | GGSISSGGYYWSWIRQHPGKGLEWI | |
| | | GYMYYSGSTYYNPSLKSRVTIFVDT | |
| | | SKNHFSLKLTSVTAADTAVYYCARD | |
| | | SYENYYGSGSLEPNYHHYNMDVWGQ | |
| | | GTTVTVSS | |
| | HC | QVQLQESGPGLVKPSQTLSLTCSVS | 1528 |
| | variable | GGSISSGGYYWSWIRQHPGKGLEWI | |
| | | GYMYYSGSTYYNPSLKSRVTIFVDT | |
| | | SKNHFSLKLTSVTAADTAVYYCAR | |
| | HCDR1 | SGGYYWS | 1235 |
| | HCDR2 | YMYYSGSTYYNPSLKS | 1529 |
| | HCDR3 | DSYENYYGSGSLEPNYHHYNMDV | 1530 |
| | HFR1 | QVQLQESGPGLVKPSQTLSLTCSVS | 1531 |
| | | GGSIS | |
| | HFR2 | WIRQHPGKGLEWIG | 1239 |
| | HFR3 | RVTIFVDTSKNHFSLKLTSVTAADT | 1532 |
| | | AVYYCAR | |
| | HFR4 | WGQGTTVTVSS | 147 |
| | LC | DVQMTQSPSTLSASIGDRVTITCRA | 1533 |
| | | SQSISGWLAWYQQRPGKAPKLLIYR | |
| | | ASSLDFGVPSRFSGNGSGTEFTLTI | |
| | | SSLQPDDFATYYCQQYHTYRTFGQG | |
| | | TKVEVK | |
| | LC | DVQMTQSPSTLSASIGDRVTITCRA | 1534 |
| | variable | SQSISGWLAWYQQRPGKAPKLLIYR | |
| | | ASSLDFGVPSRFSGNGSGTEFTLTI | |
| | | SSLQPDDFATYYCQQYHTY | |
| | LCDR1 | RASQSISGWLA | 1535 |
| | LCDR2 | RASSLDF | 1536 |
| | LCDR3 | QQYHTYRT | 1537 |
| | LFR1 | DVQMTQSPSTLSASIGDRVTITC | 1538 |
| | LFR2 | WYQQRPGKAPKLLIY | 1181 |
| | LFR3 | GVPSRFSGNGSGTEFTLTISSLQPD | 1539 |
| | | DFATYYC | |
| | LFR4 | FGQGTKVEVK | 1540 |
| S728-430 | HC | EVQLVESGGGLIQPGGSLRLSCAAS | 1541 |
| | | GFTVSSNYMSWVRQAPGKGLEWVSV | |
| | | IYSGGSTYYADSVKGRFTISRDNSK | |
| | | NTLYLQMNSLRAEDTAVYYCARTPR | |
| | | GSRRGAFDIWGQGTMVTVSS | |
| | HC | EVQLVESGGGLIQPGGSLRLSCAAS | 1542 |
| | variable | GFTVSSNYMSWVRQAPGKGLEWVSV | |
| | | IYSGGSTYYADSVKGRFTISRDNSK | |
| | | NTLYLQMNSLRAEDTAVYYCAR | |
| | HCDR1 | SNYMS | 358 |
| | HCDR2 | VIYSGGSTYYADSVKG | 392 |
| | HCDR3 | TPRGSRRGAFDI | 1543 |
| | HFR1 | EVQLVESGGGLIQPGGSLRLSCAAS | 1544 |
| | | GFTVS | |
| | HFR2 | WVRQAPGKGLEWVS | 130 |
| | HFR3 | RFTISRDNSKNTLYLQMNSLRAEDT | 146 |
| | | AVYYCAR | |
| | HFR4 | WGQGTMVTVSS | 44 |
| | LC | DIQMTQSPSSLSASVGDRVTITCQA | 1545 |
| | | SQDISDYLNWYQQKPGKAPKLLIYD | |
| | | ASNLETGVPSRFSGSGSGTDFTFTI | |
| | | SSLQPEDIATYYCQQYDNLPPLTFG | |
| | | GGTKVEIK | |
| | LC | DIQMTQSPSSLSASVGDRVTITCQA | 1546 |
| | variable | SQDISDYLNWYQQKPGKAPKLLIYD | |
| | | ASNLETGVPSRFSGSGSGTDFTFTI | |
| | | SSLQPEDIATYYCQQYDNLPP | |
| | LCDR1 | QASQDISDYLN | 1547 |
| | LCDR2 | DASNLET | 770 |
| | LCDR3 | QQYDNLPPLT | 1548 |
| | LFR1 | DIQMTQSPSSLSASVGDRVTITC | 251 |
| | LFR2 | WYQQKPGKAPKLLIY | 252 |
| | LFR3 | GVPSRFSGSGSGTDFTFTISSLQPE | 997 |
| | | DIATYYC | |
| | LFR4 | FGGGTKVEIK | 85 |
| S728-537 | HC | QVQLVQSGAEVKKPGASVKVSCKTS | 1549 |
| | | GYTFTGFYLHWLRQAPGQGLEWMGR | |
| | | INPNTGDTDYAQKFQGRVTMTRDTS | |
| | | ISTAYMELSRLRADDTAVYYCARTP | |
| | | GQTRQLFVGTNVLDVWGQGTMVTVS | |
| | | S | |
| | HC | QVQLVQSGAEVKKPGASVKVSCKTS | 1550 |
| | variable | GYTFTGFYLHWLRQAPGQGLEWMGR | |
| | | INPNTGDTDYAQKFQGRVTMTRDTS | |
| | | ISTAYMELSRLRADDTAVYYCAR | |
| | HCDR1 | GFYLH | 1551 |
| | HCDR2 | RINPNTGDTDYAQKFQG | 1552 |
| | HCDR3 | TPGQTRQLFVGTNVLDV | 1553 |
| | HFR1 | QVQLVQSGAEVKKPGASVKVSCKTS | 1381 |
| | | GYTFT | |
| | HFR2 | WLRQAPGQGLEWMG | 1554 |
| | HFR3 | RVTMTRDTSISTAYMELSRLRADDT | 1555 |
| | | AVYYCAR | |
| | HFR4 | WGQGTMVTVSS | 44 |
| | LC | DIQMTQSPSSVSASVGDRVTITCRA | 1556 |
| | | SQGISSWLAWYQQKPGKAPKVLIFA | |
| | | ASSLQSGVPSRFSGSGSGTDFTLTI | |
| | | TSLQPEDFATYFCQQTNSFPPTFGG | |
| | | GTKVEIK | |
| | LC | DIQMTQSPSSVSASVGDRVTITCRA | 1557 |
| | variable | SQGISSWLAWYQQKPGKAPKVLIFA | |
| | | ASSLQSGVPSRFSGSGSGTDFTLTI | |
| | | TSLQPEDFATYFCQQTNSFPP | |
| | LCDR1 | RASQGISSWLA | 1558 |
| | LCDR2 | AASSLQS | 249 |
| | LCDR3 | QQTNSFPPT | 1559 |
| | LFR1 | DIQMTQSPSSVSASVGDRVTITC | 1560 |
| | LFR2 | WYQQKPGKAPKVLIF | 1561 |
| | LFR3 | GVPSRFSGSGSGTDFTLTITSLQPE | 1562 |
| | | DFATYFC | |
| | LFR4 | FGGGTKVEIK | 85 |
| S728-1157 | HC | [sequence omitted] | 1563 |
| | | GLLVSRNYMNWVRQAPGKGLEWVSI | |
| | | IYSGGSTFYADSVEGRFTISRDESK | |
| | | NTLYLQMNSLRTDDTAVYYCARDLS | |
| | | DYGGIDCWGQGTLVTVSS | |
| | HC | [sequence omitted] | 1564 |
| | variable | GLLVSRNYMNWVRQAPGKGLEWVSI | |
| | | IYSGGSTFYADSVEGRFTISRDESK | |
| | | NTLYLQMNSLRTDDTAVYYCAR | |
| | HCDR1 | RNYMN | 1565 |
| | HCDR2 | IIYSGGSTFYADSVEG | 1566 |
| | HCDR3 | DLSDYGGIDC | 1567 |
| | HFR1 | [sequence omitted] | 1568 |
| | | GLLVS | |
| | HFR2 | WVRQAPGKGLEWVS | 130 |
| | HFR3 | RFTISRDESKNTLYLQMNSLRTDDT | 1569 |
| | | AVYYCAR | |
| | HFR4 | WGQGTLVTVSS | 60 |
| | LC | YELTQPLSVSMALGQTARISCGGDN | 1570 |
| | | VGSQNVHWYQQRPGQAPVLVIYRDS | |
| | | NRPSGIPERFSGSKSGNTATLTISR | |
| | | AQAGDEADYYCQVWDSSTVAFGGGT | |
| | | KLTVL | |
| | LC | YELTQPLSVSMALGQTARISCGGDN | 1571 |
| | variable | VGSQNVHWYQQRPGQAPVLVIYRDS | |
| | | NRPSGIPERFSGSKSGNTATLTISR | |
| | | AQAGDEADYYCQVWDSST | |
| | LCDR1 | GGDNVGSQNVH | 1572 |
| | LCDR2 | RDSNRPS | 1573 |
| | LCDR3 | QVWDSSTVA | 1574 |
| | LFR1 | YELTQPLSVSMALGQTARISC | 1575 |
| | LFR2 | WYQQRPGQAPVLVIY | 950 |
| | LFR3 | GIPERFSGSKSGNTATLTISRAQAG | 1576 |
| | | DEADYYC | |
| | LFR4 | FGGGTKLTVL | 69 |
| S728-1261 | HC | QVQLQESGPGLVKPSGTLSLTCAVS | 1577 |
| | | GGSISNNNWWIWVRQPPGKGLEWIG | |
| | | EIHHSGSTDYNPSLKSRVTISIDKS | |
| | | KNQFSLRLSSVTAADTAVYYCARKP | |
| | | EPYYYYYYMDVWGKGTTVTVSS | |
| | HC | QVQLQESGPGLVKPSGTLSLTCAVS | 1578 |
| | variable | GGSISNNNWWIWVRQPPGKGLEWIG | |
| | | EIHHSGSTDYNPSLKSRVTISIDKS | |
| | | KNQFSLRLSSVTAADTAVYYCAR | |
| | HCDR1 | NNNWWI | 1579 |
| | HCDR2 | EIHHSGSTDYNPSLKS | 1580 |
| | HCDR3 | KPEPYYYYYYMDV | 1581 |
| | HFR1 | QVQLQESGPGLVKPSGTLSLTCAVS | 217 |
| | | GGSIS | |
| | HFR2 | WVRQPPGKGLEWIG | 218 |
| | HFR3 | RVTISIDKSKNQFSLRLSSVTAADT | 1582 |
| | | AVYYCAR | |
| | HFR4 | WGKGTTVTVSS | 670 |
| | LC | ETVLTQSPGTLSLSPGERATLSCRA | 1583 |
| | | SQSVSSSYITWYQQKPGQAPRLLIY | |
| | | GASSRATGIPDRFSGSGSGTDFTLT | |
| | | ISRLEPEDFAVYYCQQYRSPWGLTF | |
| | | GPGTKVDIK | |
| | LC | ETVLTQSPGTLSLSPGERATLSCRA | 1584 |
| | variable | SQSVSSSYITWYQQKPGQAPRLLIY | |
| | | GASSRATGIPDRFSGSGSGTDFTLT | |
| | | ISRLEPEDFAVYYCQQYRS | |
| | LCDR1 | RASQSVSSSYIT | 1585 |
| | LCDR2 | GASSRAT | 135 |
| | LCDR3 | QQYRSPWGLT | 1586 |
| | LFR1 | ETVLTQSPGTLSLSPGERATLSC | 1587 |
| | LFR2 | WYQQKPGQAPRLLIY | 182 |
| | LFR3 | GIPDRFSGSGSGTDFTLTISRLEPE | 196 |
| | | DFAVYYC | |
| | LFR4 | FGPGTKVDIK | 443 |
| S728-1690 | HC | QVQLVQSGAEVVKPGSSVKVSCKAS | 1588 |
| | | GGTFTRYAISWVRQAPGQGPEWMGR | |
| | | IIPMFGIANYAQRFQGRVTMTADKS | |
| | | TSTAYMELSSLRSEDTAVYYCATCQ | |
| | | YYYDSSGYGSLDYWGQGTQVTVSS | |
| | HC | QVQLVQSGAEVVKPGSSVKVSCKAS | 1589 |
| | variable | GGTFTRYAISWVRQAPGQGPEWMGR | |
| | | IIPMFGIANYAQRFQGRVTMTADKS | |
| | | TSTAYMELSSLRSEDTAVYYCA | |
| | HCDR1 | RYAIS | 1590 |
| | HCDR2 | RIIPMFGIANYAQRFQG | 1591 |
| | HCDR3 | CQYYYDSSGYGSLDY | 1592 |
| | HFR1 | QVQLVQSGAEVVKPGSSVKVSCKAS | 1593 |
| | | GGTFT | |
| | HFR2 | WVRQAPGQGPEWMG | 1594 |
| | HFR3 | RVTMTADKSTSTAYMELSSLRSEDT | 1595 |
| | | AVYYCAT | |
| | HFR4 | WGQGTQVTVSS | 1596 |
| | LC | EIVLTQSPGTLSLSPGERVTLSCRA | 1597 |
| | | SQSISSNFLAWYQQKPGQAPRLLIS | |
| | | GASSRATGIPDRFSGGGSGTDFTLT | |
| | | ISRLEPEDFAVYYCQQYHSSPRTFG | |
| | | QGTKVEIK | |
| | LC | EIVLTQSPGTLSLSPGERVTLSCRA | 1598 |
| | variable | SQSISSNFLAWYQQKPGQAPRLLIS | |
| | | GASSRATGIPDRFSGGGSGTDFTLT | |
| | | ISRLEPEDFAVYYCQQYHSSP | |
| | LCDR1 | RASQSISSNFLA | 1599 |
| | LCDR2 | GASSRAT | 135 |
| | LCDR3 | QQYHSSPRT | 1600 |
| | LFR1 | EIVLTQSPGTLSLSPGERVTLSC | 1601 |
| | LFR2 | WYQQKPGQAPRLLIS | 1489 |
| | LFR3 | GIPDRFSGGGSGTDFTLTISRLEPE | 1602 |
| | | DFAVYYC | |
| | LFR4 | FGQGTKVEIK | 53 |

TABLE 2
Nucleic Acid Sequences

| | | | SEQ |
|---|---|---|---|
| | | | ID |
| Clone | Description | Sequence | NO |
| S20- | HC-DNA | CAGGTGCAGCTGCAGGAGTCGGGCCCAGGACTGGTGAGGCCTTCGGA | 1603 |
| 15 | | GACCCTGTCCCTCACCTGCACTGTCTCTGGTGGCTCCATCAGTAGTCA | |
| | | CTACTGGAGCTGGATCCGGCAGCCCCCCGGGAAGGGACTGGAGTGGA | |
| | | TTGGGTATATCTATTATAGTGGGAGCACCAATTACAACCCCTCCCTCA | |
| | | AGAGTCGAGTCACCATATCAGTAGACACGTCCAAGAACCAGTTCTCC | |
| | | CTGAAACTTATCTCTGTGACCGCTGCGGACACGGCCGTGTATTACTGT | |
| | | GCGAGAGCCGGGGGCGTTTTTGGAGTGGTTCTGGACTTTGACCACTG | |
| | | GGGCCGGGGAACCCTGGTCACCGTCTCCTCAGCCTCCACCAAGGGCC | |
| | | CATCGGTCTTCCCCCTGGCACCCTCCTCCAAGAGCACCTCTGGGGGCA | |
| | | CAGCGGCCCTGGGCTGCCTGGTCAAGGACTACTTCCCCGAACCGGTG | |
| | | ACGGTGTCGTGGAACTCAGGCGCCCTGACCAGCGGCGTGCACACCTT | |
| | | CCCGGCTGTCCTACAGTCCTCAGGA | |
| | LC-DNA | TCCTATGTGCTGACTCAGCCACCCTCGGTGTCAGTGGCCCCAGGACAG | 1604 |
| | | ACGGCCAGGATTACCTGTGGGGGAAACAACATTGGAAGTAAAAGTGT | |
| | | GCACTGGTACCAGCAGAAGCCAGGCCAGGCCCCTGTGCTGGTCGTCT | |
| | | ATGATGATAGCGACCGGCCCTCAGGGATCCCTGAGCGATTCTCTGGCT | |
| | | CCAACTCTGGGAACACGGCCACCCTGACCATCAGCAGGGTCGAAGCC | |
| | | GGGGATGAGGCCGACTATTACTGTCAGGTGTGGGATAGTAGTAGTGA | |
| | | GCATTATGTCTTCGGAACTGGGACCAAGGTCACCGTCCTAGGTCAGCC | |
| | | CAAGGCCAACCCCACTGTCACTCTGTTCCCGCCCTCCTCTGAGGAGCT | |
| | | CCAAGCCAACAAGGCCACACTAGTGTGTCTGATCAGTGACTTCTACCC | |
| | | GGGAGCTGTGACAGTGGCCTGGAAGGCAGATGGCAGCCCCGTCAAGG | |
| | | CGGGAGTGGAGACCACCAAACCCTCCAAACAGAGCAACAACAAGTA | |
| | | CGCGGCCAGCAGCTA | |
| S20- | HC-DNA | CAGGTGCAGCTGCAGGAGTCGGGCCCAGGACTGGTGAAGCCTTCGGA | 1605 |
| 22 | | GACCCTGTCCCTCACCTGCACTGTCTCTGGTGGCTCCATCAGTAGTTT | |
| | | CTACTGGGGCTGGATCCGGCAGCCCGCCGGGAAGGGACTGGAGTGGA | |
| | | TTGGGCGTTTCCATACTAGTGGGAGCACCAACTACAACCCCTCCTTCA | |
| | | AGAGTCGAGTCACCATGTCAGTAGACACGTCCAAGAACCAGTTCTCC | |
| | | CTGAAGCTGACCTCTGTGACCGCCGCGGACACGGCCGTGTATTACTGT | |
| | | GCGAGCGGCCGGGGCAGCAGCTGGTACGTAGGCTGGTTCTTCGATCT | |
| | | CTGGGGCCGTGGCACCCTGGTCACTGTCTCCTCAGCCTCCACCAAGGG | |
| | | CCCATCGGTCTTCCCCCTGGCACCCTCCTCCAAGAGCACCTCTGGGGG | |
| | | CACAGCAGCCCTGGGCTGCCTGGTCAAGGACTACTTCCCCGAACCGG | |
| | | TGACGGTGTCGTGGAACTCAGGCGCCCTGACCAGCGGCGTGCACACC | |
| | | TTCCCGGCTGTCCTACAGTCCTCAGGA | |
| | LC-DNA | GACATCGTGATGACCCAGTCTCCAGACTCCCTGGCTGTGTCTCTGGGC | 1606 |
| | | GAGAGGGCCACCATCAACTGCAAGTCCAGCCAGACTGTTTTATACAG | |
| | | CTCCAACAATAAGAACTACTTAGCTTGGTACCAGCAGAAACCAGGAC | |
| | | AGCCTCCTAAGTTGCTCATTTACTGGGCATCTACCCGGGAATCCGGGG | |
| | | TCCCTGACCGATTCAGTGGCAGCGGGTCTGGGACAGATTTCACTCTCA | |
| | | CCATCAGCAGCCTGCAGGCTGGAGATGTGGCAGTTTATTACTGTCAGC | |
| | | AATATTATAATACTCCGGACACTTTCGGCGGAGGGACCAAGGTGGAG | |
| | | ATCAATCGAACTGTGGCTGCACCATCTGTCTTCATCTTCCCGCCATCT | |
| | | GATGAGCAGTTGAAATCTGGAACTGCCTCTGTTGTGTGCCTGCTGAAT | |
| | | AACTTCTATCCCAGAGAGGCCAAAGTACAGTGGAAGGTGGATAACGC | |
| S20- | HC-DNA | CAGGTCCAACTCATACAGTCAGGGGCTGAGGTGAAGAAGCCTGGGGC | 1607 |
| 31 | | CTCAGTGAAGGTCTCCTGCACGGCCTCCGGATACTCCCTCAATGAGTT | |
| | | GCCCATACAGTGGGTGCGGCAGGCTCCTGGTAAAGGGCTTGAGTGGA | |
| | | TGGGAGAATTTGATCCCGAAGATGGTGAAACAATCTACGCAGAGAAA | |
| | | TTCCAGGGCAGAGTCACCCTGACCGAGGAAACATCTACAAACACAGC | |
| | | CTACATGGAGTTGAGCAGCCTGAAATCTGAGGACACGGCCGCGTATT | |
| | | TTTGTTCAACCGGCTCGACTATTGGCGTCGTCATTTATGCTTTTGCTAT | |
| | | CTGGGGCCAAGGGACAATGGTCACCGTCTCTTCAGCTTCCACCAAGG | |
| | | GCCCATCGGTCTTCCCCCTGGCGCCCTGCTCCAGGAGCACCTCCGAGA | |
| | | GCACAGCCGCCCTGGGCTGCCTGGTCAAGGACTACTTCCCCGAACCG | |
| | | GTGACGGTGTCGTGGAACTCAGGCGCCCTGACCAGCGGCGTGCACAC | |
| | | CTTCCCGGCTGTCCTACAGTCCTCAGGA | |
| | LC-DNA | GAAATTGTGTTGACGCAGTCCCCAGGCACCCTGTCTTTGTCTCCAGGG | 1608 |
| | | GAAAGAGCCACCCTCTCCTGCAGGGCCAGTCAGGATATTACCAACAA | |
| | | CTTCTTAGCCTGGTACCAGCAGAAAGCCGGCCAGGCTCCCAAACTCTT | |
| | | CATCTATGGTGCATCCAGGAGGGCCCCTGGCATCCCACACAGGTTCA | |
| | | GTGGCAGTGGGTCTGGGACAGACTTCACTCTCACCATCAGCAGCCTG | |
| | | GAGCCTGAAGATTTTGCAGTATATTACTGTCAGCAGTACGGTCCCTCT | |
| | | CCGACGTTCGGCCAAGGGACCAAGGTGGAAATCAAACGAACTGTGGC | |
| | | TGCACCATCTGTCTTCATCTTCCCGCCATCTGATGAGCAGTTGAAATC | |
| | | TGGAACTGCCTCTGTTGTGTGCCTGCTGAATAACTTCTATCCCAGAGA | |
| | | GGCCAAAGTACAGTGGAAGGTGGATAACGCCCTCCAATCGGGTAACT | |
| | | CCCAGGAGAGTGTCACAGAGCAGGACAGCAAGGACAGCACCTACAG | |
| | | CCTCAGCAGCACCCTGACGCTGAGCAAAGCAGACTACGAGAA | |
| S20- | HC-DNA | CAGGTGCAGCTGCAGGAGTCGGGCCCAGGACTGGTGAAGCCTTCGGA | 1609 |
| 40 | | GACCCTGTCCCTCACCTGCACTGTCTCTGGTGGCTCCATCAGTAGTTA | |
| | | CTACTGGAGCTGGATCCGGCAGCCCGCCGGGAAGGGACTGGAGTGGA | |
| | | TTGGGCGTATCTATACCAGTGGGAGCACCAACTACAACCCCTCCCTCA | |
| | | AGAGTCGAGTCACCATGTCAGTAGACACGTCCAAGAACCAGTTCTCC | |
| | | CTGAAGCTGAGCTCTGTGACCGCCGCGGACACGGCCGTGTATTACTGT | |
| | | GCGAGAGGGGGCAGTGGCTGGCGCTTTGACTACTGGGGCCAGGGAAC | |
| | | CCTGGTCACCGTCTCCTCAGGGAGTGCATCCGCCCCAACCCTTTTCCC | |
| | | CCTCGTCTCCTGTGAGAATTCCCCGTCGGATACGAGCAGCGTG | |
| | LC-DNA | CAGTCTGCCCTGACTCAGCCTGCCTCCGTGTCTGGGTCTCCTGGACAG | 1610 |
| | | TCGATCACCATCTCCTGCACTGGAACCAGCAGTGACGTTGGTGGTTAT | |
| | | AACTATGTCTCCTGGTACCAACAGCACCCAGGCAAAGCCCCCAAACT | |
| | | CATGATTTATGATGTCAGTAATCGGCCCTCAGGGGTTTCTAATCGCTT | |
| | | CTCTGGCTCCAAGTCTGGCAACACGGCCTCCCTGACCATCTCTGGGCT | |
| | | CCAGGCTGAGGACGAGGCTGATTATTACTGCAGCTCATATACAAGCA | |
| | | GCAGCACTCTCGGAGTGTTCGGCGGAGGGACCAAGCTGACCGTCCTA | |
| | | GGTCAGCCCAAGGCTGCCCCCTCGGTCACTCTGTTCCCACCCTCCTCT | |
| | | GAGGAGCTTCAAGCCAACAAGGCCACACTGGTGTGTCTCATAAGTGA | |
| | | CTTCTACCCGGGAGCCGTGACAGTGGCCTGGAAGGCAGATAGCAGCC | |
| | | CCGTCAAGGCGGGAGTGGAGACCACCACACCCTCCAAACAAAGCAAC | |
| | | AACAAGTACGCGGCCAGCAGCTA | |
| S20- | HC-DNA | CAGGTGCAGCTGCAGGAGTCGGGCCCAGGACTGGTGAAGCCTTCACA | 1611 |
| 58 | | GACCCTGTCCCTCACCTGCACTGTCTCTGGTGGCTCCATCAACAGTGG | |
| | | TGATTACTACTGGAGCTGGATCCGCCAGCCCCCAGGGAAGGGCCTGG | |
| | | AGTGGATTGGGTACATCTATTTCAGTGGGAGCACCTACTACAACCCGT | |
| | | CCCTCAAGAGTCGAGTTACCATATCACTAGACAGGTCCAAGAACCAG | |
| | | TTCTCCCTGAAGCTGAGCTCTGTGACTGCCGCAGACACGGCCGTGTAT | |
| | | TACTGTGCCAGAGAGGAAAGTATGATTACGCTTGGGGGAGTTATCGT | |
| | | CGACTGGGGCCAGGGAACCCTGGTCACCGTCTCCTCAGCCTCCACCA | |
| | | AGGGCCCATCGGTCTTCCCCCTGGCACCCTCCTCCAAGAGCACCTCTG | |
| | | GGGGCACAGCAGCCCTGGGCTGCCTGGTCAAGGACTACTTCCCCGAA | |
| | | CCGGTGACGGTGTCGTGGAACTCAGGCGCCCTGACCAGCGGCGTGCA | |
| | | CACCTTCCCGGCTGTCCTACAGTCCTCAGGA | |
| | LC-DNA | GATATTGTGATGACCCAGACTCCACTCTCCTCACCTGTCACCCTTGGA | 1612 |
| | | CAGCCGGCCTCCATCTCCTGCAGGTCTAGTCAAAGCCTCGTACACAGT | |
| | | GATGGAGACACCTACTTGAGTTGGCTTCAGCAGAGGCCAGGCCAGCC | |
| | | TCCAAGACTCCTAATTTACAAGATTTCTAACCGGTTCTCTGGGGTCCC | |
| | | AGACAGATTCAGTGGCAGTGGGGCAGGGACAGATTTCACACTGAAAA | |
| | | TCAGCAGGGTGGAAGCTGAGGATGTCGGGGTTTATTACTGCATGCAA | |
| | | GCTACACAATTTCCTCTCACTTTCGGCGGAGGGACCAAGGTGGAGAT | |
| | | CAAACGAACTGTGGCTGCACCATCTGTCTTCATCTTCCCGCCATCTGA | |
| | | TGAGCAGTTGAAATCTGGAACTGCCTCTGTTGTGTGCCTGCTGAATAA | |
| | | CTTCTATCCCAGAGAGGCCAAAGTACAGTGGAAGGTGGATAACGCCC | |
| | | TCCAATCGGGTAACTCCCAGGAGAGTGTCACAGAGCAGGACAGCAAG | |
| | | GACAGCACCTACAGCCTCAGCAGCACCCTGACGCTGAGCAAAGCAGA | |
| | | CTACGAGAA | |
| S20- | HC-DNA | CAGGTGCAGCTGCAGGAGTCGGGCCCAGGACTGGTGAAGCCTTCGGA | 1613 |
| 74 | | GACCCTGTCCCTCACCTGCACTGTCTCTGGTGGCTCCATCAGTAGTCA | |
| | | CTACTGGAGCTGGATCCGGCAGCCCCCAGGGAAGGGACTGGAGCAGA | |
| | | TTGGGTATATGTATTACAGTGGGAGCACCAACTACAACCCCTCCCTCA | |
| | | AGAGTCGAGTCATCATATCAGTAGACACGTCCAAGAACCAGTTCTCC | |
| | | CTGAAGTTGAGCTCTGTGACCGCTGCGGACACGGCCGTGTATTACTGT | |
| | | GCGGGTCGTGACCAGCTGTTATACGGGGCCGATGGTTTTGATATCTGG | |
| | | GGCCAAGGGACAATGGTCACCGTCTCTTCAGCCTCCACCAAGGGCCC | |
| | | ATCGGTCTTCCCCCTGGCACCCTCCTCCAAGAGCACCTCTGGGGGCAC | |
| | | AGCGGCCCTGGGCTGCCTGGTCAAGGACTACTTCCCCGAACCGGTGA | |
| | | CGGTGTCGTGGAACTCAGGCGCCCTGACCAGCGGCGTGCACACCTTC | |
| | | CCGGCTGTCCTACAGTCCTCAGGA | |
| | LC-DNA | CAGTCTGCCCTGACTCAGCCTCCCTCCGCGTCCGGGTCTCCTGGACAG | 1614 |
| | | TCAGTCACCATCTCCTGCACTGGAACCAGCAGTGACGTTGGTGGTTAT | |
| | | AACTATGTCTCCTGGTACCAACAGCACCCAGGCAAAGCCCCCAAACT | |
| | | CATGATTTATGAGGTCAGTAAGCGGCCCTCAGGGGTCCCTGATCGCTA | |
| | | CTCTGGCTCCAAGTCTGGCAACACGGCCTCCCTGACCGTCTCTGGGCT | |
| | | CCAGGCTGAGGATGAGGCTGATTATTACTGCAGCTCATATGCAGGCA | |
| | | GCAGCAATCATGTGATATTCGGCGGAGGGACCAAGCTGACCGTCCTA | |
| | | GGTCAGCCCAAGGCTGCCCCCTCGGTCACTCTGTTCCCGCCCTCCTCT | |
| | | GAGGAGCTTCAAGCCAACAAGGCCACACTGGTGTGTCTCATAAGTGA | |
| | | CTTCTACCCGGGAGCCGTGACAGTGGCCTGGAAGGCAGATAGCAGCC | |
| | | CCGTCAAGGCGGGAGTGGAGACCACCACACCCTCCAAACAAAGCAAC | |
| | | AACAAGTACGCGGCCAGCAGCTA | |
| S20- | HC-DNA | GAAGTGCAGCTGGTGGAGTCTGGGGGAGGCTTGGTACAGCCTGGCAG | 1615 |
| 86 | | GTCCCTGAGACTCTCCTGTGCAGCCTCTGGATTCACCTTTGGTGACTA | |
| | | TGCCATGTACTGGGTCCGGCAACCTCCAGGGAAGGGCCTGGAGTGGG | |
| | | TCTCAGGTATTAGTTGGAATAGAGGTACTATAGGCTATGCGGACTCTG | |
| | | TGAAGGGCCGATTCACCATCTCCAGAGACAACGCCAAGAACTCCCTG | |
| | | TATCTGCAAATGAACAGTCTGACACCTGAGGACACGGCCTTGTATTAC | |
| | | TGTGCAAAAGATATGCTACCAGCTAGTAGGTTCTTCTACTACATGGAC | |
| | | GTCTGGGGCAAAGGGACCACGGTCATCGTCTCCTCAGCCTCCACCAA | |
| | | GGGCCCATCGGTCTTCCCCCTGGCACCCTCCTCCAAGAGCACCTCTGG | |
| | | GGGCACAGCAGCCCTGGGCTGCCTGGTCAAGGACTACTTCCCCGAAC | |
| | | CGGTGACGGTGTCGTGGAACTCAGGCGCCCTGACCAGCGGCGTGCAC | |
| | | ACCTTCCCGGCTGTCCTACAGTCCTCAGGA | |
| | LC-DNA | CAGTCTGCCCTGACTCAGCCTGCCTCCGTGTCTGGGTCTCCTGGACAG | 1616 |
| | | TCGATCACCATCTCCTGCACTGGAACCAGCAGTGACGTTGGTGGTTAT | |
| | | AACTATGTCTCCTGGTACCAACAACACCCAGGCAAAGCCCCCAAACT | |
| | | CATGATTTATGATGTCAGTAATCGGCCCTCAGGGGTTTCTAATCGCTT | |
| | | CTCTGGCTCCAAGTCTGGCAACACGGCCTCCCTGACCATCTCTGGGCT | |
| | | CCAGGCTGAGGACGAGGCTGATTATTACTGCAGCTCATATACAAGCA | |
| | | GCAGCACTCTCGGCGTCTTCGGAACTGGGACCAAGGTCACCGTCCTA | |
| | | GGTCAGCCCAAGGCCAACCCCACTGTCACTCTGTTCCCGCCCTCCTCT | |
| | | GAGGAGCTCCAAGCCAACAAGGCCACACTAGTGTGTCTGATCAGTGA | |
| | | CTTCTACCCGGGAGCTGTGACAGTGGCCTGGAAGGCAGATGGCAGCC | |
| | | CCGTCAAGGCGGGAGTGGAGACCACCAAACCCTCCAAACAGAGCAA | |
| | | CAACAAGTACGCGGCCAGCAGCTA | |
| S24- | HC-DNA | CAGGTGCAGCTGCAGGAGTCGGGCCCAGGACTGGTGAAGCCTTCGGA | 1617 |
| 68 | | GACCCTGTCCCTCACCTGCACTGTCTCTGGTGGCTCCATCACTAGTTA | |
| | | CTACTGGAGCTGGATCCGGCAGCCCCCAGGGAAGGGACTGGAGTGGA | |
| | | TTGAATATATCCATTACAGTGGGAGCACCAACTACAACCCCTCCCTCA | |
| | | AGAGTCGAGTCACCATATCAGTAGACACGTCCAAGAACCAGTTCTCC | |
| | | CTGAAGCTGAGCTCTGTGACCGCTGCGGACACGGCCGTGTATTACTGT | |
| | | GCGAGATTGCTCAAGTATAGCAGGGGGGGGTGCTACTTTGACCACTG | |
| | | GGGCCAGGGAACCCTGGTCACCGTCTCCTCAGCCTCCACCAAGGGCC | |
| | | CATCGGTCTTCCCCCTGGCACCCTCCTCCAAGAGCACCTCTGGGGGCA | |
| | | CAGCGGCCCTGGGCTGCCTGGTCAAGGACTACTTCCCCGAACCGGTG | |
| | | ACGGTGTCGTGGAACTCAGGCGCCCTGACCAGCGGCGTGCACACCTT | |
| | | CCCGGCTGTCCTACAGTCCTCAGGA | |
| | LC-DNA | CAGTCTGTGCTGACTCAGCCACCCTCAGCGTCTGGGACCCCCGGGCA | 1618 |
| | | GAGGGTCACCATCTCTTGTTCTGGAAGCAGCTCCAACATCGGAGGTA | |
| | | ATCCTGTAAACTGGTACCAGCAGCTCCCAGGAACGGCCCCCAAACTC | |
| | | CTCATCTATAGTAATAATCAGCGGCCCTCAGGGGTCCCTGACCGATTC | |
| | | TCTGGCTCCAAGTCTGGCACCTCAGCCTCCCTGGCCATCAGTGGGCTC | |
| | | CAGTCTGAGGATGAGGCTGATTATTACTGTGCAGCATGGGATGACAG | |
| | | CCTGAAGGGTCCGGTATTCGGCGGAGGGACCAAGCTGACCGTCCTAG | |
| | | GTCAGCCCAAGGCTGCCCCCTCGGTCACTCTGTTCCCGCCCTCCTCTG | |
| | | AGGAGCTTCAAGCCAACAAGGCCACACTGGTGTGTCTCATAAGTGAC | |
| | | TTCTACCCGGGAGCCGTGACAGTGGCCTGGAAGGCAGATAGCAGCCC | |
| | | CGTCAAGGCGGGAGTGGAGACCACCACACCCTCCAAACAAAGCAAC | |
| | | AACAAGTACGCGGCCAGCAGCTACCTGAGCCTGACGCCTGAGCAGTG | |
| | | GAAGTCCCACA | |
| S24- | HC-DNA | GAGGTGCAGCTGGTGGAGTCTGGGGGAGGCTTGGTACAGCCGGGGGG | 1619 |
| 105 | | GTCCCTGAGACTCTCCTGTGCAGCCTCTGGATTCACCCTCAGCAGCTA | |
| | | TAGCATGAACTGGGTCCGCCAGGCTCCAGGGAAGGGGCTGGAGTGGG | |
| | | TTTCATACATTAGTAGTAGTAGTAGCACCATATACTACGCAGACTCTG | |
| | | TGAAGGGCCGATTCACCATCTCCAAAGACAACGCCAAGAACTCACTG | |
| | | TATCTGCAAATGAACAGCCTGAGAGCCGAGGACACGGCTGTCTATTA | |
| | | CTGTGCGGTCGGACGGGGATACTTTGTCTACTGGGGCCAGGGAACCC | |
| | | TGGTCACCGTCTCCTCAGCCTCCACCAAGGGCCCATCGGTCTTCCCCC | |
| | | TGGCACCCTCCTCCAAGAGCACCTCTGGGGGCACAGCGGCCCTGGGC | |
| | | TGCCTGGTCAAGGACTACTTCCCCGAACCGGTGACGGTGTCGTGGAA | |
| | | CTCAGGCGCCCTGACCAGCGGCGTGCACACCTTCCCGGCTGTCCTACA | |
| | | GTCCTCAGGA | |
| | LC-DNA | GAAATTGTGTTGACGCAGTCTCCAGGCACCCTGTCTTTGTCTCCAGGG | 1620 |
| | | GAAAGAGCCACCCTCTCCTGCAGGGCCAGTCAGAGTGTTAGCAGCGG | |
| | | TTACTTAGCCTGGTACCAGCAAAAACCTGGCCAGGCTCCCAGGCTCCT | |
| | | CATCTTTGGTGCATCCAGCAGGGCCACTGGCATCCCAGACAGGTTCA | |
| | | GTGGCAGTGGGTCTGGGACAGACTTCACTCTCACCATCAACAGACTG | |
| | | GAGCCTGAAGATTTTGCAGTGTATTACTGTCAGCAGTATGGTAGCTCA | |
| | | CGGACGTTCGGCCAAGGGACCAAGGTGGAAATCAAACGAACTGTGGC | |
| | | TGCACCATCTGTCTTCATCTTCCCGCCATCTGATGAGCAGTTGAAATC | |
| | | TGGAACTGCCTCTGTTGTGTGCCTGCTGAATAACTTCTATCCCAGAGA | |
| | | GGCCAAAGTACAGTGGAAGGTGGATAACGCCCTCCAATCGGGTAACT | |
| | | CCCAGGAGAGTGTCACAGAGCAGGACAGCAAGGACAGCACCTACAG | |
| | | CCTCAGCAGCACCCTGACGCTGAGCAAAGCAGACTACGAGA | |
| S24- | HC-DNA | CAGGTGCAGCTGGTGGAGTCTGGGGGAGGCGTGGTCCAGCCTGGGAG | 1621 |
| 178 | | GTCCCTGAGACTCTCCTGTGCAGCCTCTGGATTCACCTTCAGTAGCTA | |
| | | TGGCATGCACTGGGTCCGCCAGGCTCCAGGCAAGGGGCTGGAGTGGG | |
| | | TGGCAGTTATATGGTATGATGGAAGTAATAAATATTATGCAGACTCC | |
| | | GTGAAGGGCCGATTCACCATCTCCAGAGACAATTCCAAGAACACGCT | |
| | | GTATCTGCAAATGAACAGCCTGAGAGCCGAGGACACGGCTGTGTATT | |
| | | ACTGTGCGAGAATCGAGGGATACAGCTATGGCGACGTGAGGGTCTAC | |
| | | TACTACTACGGTATGGACGTCTGGGGCCAAGGGACCACGGTCACCGT | |
| | | CTCCTCAGCCTCCACCAAGGGCCCATCGGTCTTCCCCCTGGCACCCTC | |
| | | CTCCAAGAGCACCTCTGGGGGCACAGCGGCCCTGGGCTGCCTGGTCA | |
| | | AGGACTACTTCCCCGAACCGGTGACGGTGTCGTGGAACTCAGGCGCC | |
| | | CTGACCAGCGGCGTGCACACCTTCCCGGCTGTCCTACAGTCCTCAGGA | |
| | LC-DNA | CAGTCTGCCCTGACTCAGCCTGCCTCCGTGTCTGGGTCTCCTGGACAG | 1622 |
| | | TCGATCACCATCTCCTGCACTGGAACCACCAGTGACGTTGGTGGTTAT | |
| | | GACTATGTCTCCTGGTACCAACAGCACCCAGGCAAAGCCCCCAAACT | |
| | | CATACTTTCTGAGGTCAGTAATCGGCCCTCAGGGGTTTCTAATCGCTT | |
| | | CTCTGGCTCCAAGTCTGGCAACACGGCCTCCCTGACCATCTCTGGGCT | |
| | | CCAGGCTGAGGACGAGGCTGATTATTACTGCAGCTCATATCCAAGCA | |
| | | GCAGCACTCTAGTCTTCGGAACTGGGACCAAGGTCACCGTCTTAGGTC | |
| | | AGCCCAAGGCCAACCCCACTGTCACTCTGTTCCCGCCCTCCTCTGAGG | |
| | | AGCTCCAAGCCAACAAGGCCACACTAGTGTGTCTGATCAGTGACTTCT | |
| | | ACCCGGGAGCTGTGACAGTGGCCTGGAAGGCAGATGGCAGCCCCGTC | |
| | | AAGGCGGGAGTGGAGACCACCACACCCTCCAAACAAAGCAACAACA | |
| | | AGTACGCGGCCAGCAGCTA | |
| S24- | HC-DNA | CAGGTCCACCTGGTGCAGTCTGGGGCTGAGGTGAAGAAGCCTGGGTC | 1623 |
| 188 | | CTCGGTGAAGGTCTCCTGCAAGGCTTCTGGAGGCACCTTCAGCAGCTG | |
| | | TGCTATCAGCTGGGTGCGACAGGCCCCTGGACAAGGGCTTGAGTGGA | |
| | | TGGGAAGGATCATCCCTATCCTTGGTATAGCAAACTACGCACAGAAG | |
| | | TTCCAGGGCAGAGTCACGATTACCGCGGACAAATCCACGAGCACAGC | |
| | | CTACATGGAGCTGAGCAGCCTGAGATCTGAGGACACGGCCGTGTATT | |
| | | ACTGTGCGAGAGGATGGGAGTTTGGTTCGGGGAGTTATTATCGAACT | |
| | | GATTACTACTACTACGCTATGGACGTCTGGGGCCAAGGGACCACGGT | |
| | | CACCGTCTCCTCAGCCTCCACCAAGGGCCCATCGGTCTTCCCCCTGGC | |
| | | GCCCTGCTCCAGGAGCACCTCTGGGGGCACAGCGGCCCTGGGCTGCC | |
| | | TGGTCAAGGACTACTTCCCCGAACCGGTGACGGTGTCGTGGAACTCA | |
| | | GGCGCCCTGACCAGCGGCGTGCACACCTTCCCGGCTGTCCTACAGTCC | |
| | | TCAGGA | |
| | LC-DNA | CAGTCTGCCCTGACTCAGCCTGCCTCCGTGTCTGGGTCTCCTGGACAG | 1624 |
| | | TCGATCACCATCTCCTGCACTGGAACCAGCAGTGACGTTGGTGGTTAT | |
| | | AACTATGTCTCCTGGTACCAACAGCACCCAGGCAAAGCCCCCAAACT | |
| | | CATGATTTATGAGGTCACTAATCGGCCCTCAGGGGTTTCTAATCGCTT | |
| | | CTCTGGCTCCAGGTCTGGCAACACGGCCTCCCTGACCATCTCTGGGCT | |
| | | CCAGGCTGAGGACGAGGCTGATTATTACTGCAGCTCATATACAAGCA | |
| | | GCAGCCTTTATGTCTTCGGAACTGGGACCAAGGTCGCCGTCCTAGGTC | |
| | | AGCCCAAGGCCAACCCCACTGTCACTCTGTTCCCGCCCTCCTCTGAGG | |
| | | AGCTTCAAGCCAACAAGGCCACACTGGTGTGTCTCATAAGTGACTTCT | |
| | | ACCCGGGAGCCGTGACAGTGGCCTGGAAGGCAGATAGCAGCCCCGTC | |
| | | AAGGCGGGAGTGGAGACCACCAAACCCTCCAAACAGAGCAACAACA | |
| | | AGTACGCGGCCAGCAGCTA | |
| S24- | HC-DNA | GAAGTGCAGCTGGTGCAGTCTGGAGCAGAGGTGAAAAAGCCCGGGG | 1625 |
| 202 | | AGTCTCTGAGGATCTCCTGTAAGGGTTCTGGATACAGCTTTAGCAGCT | |
| | | ACTGGATCAGCTGGGTGCGCCAGATGCCCGGGAAAGGCCTGGAGTGG | |
| | | ATGGGGAGGATTGATCCTAGTGACTCTAACACCAACTACAGCCCGTC | |
| | | CTTCCAAGGCCACGTCACCATCTCAGCTGACAAGTCCATCAGCACTGC | |
| | | CTACCTGCAGTGGAGCAGCCTGAAGGCCTCGGACACCGCCATGTATT | |
| | | ACTGTGCGAGACTCTCCGTCCGGGTATGGTTCGGGGAGTTACCCCATT | |
| | | ACGGTATGGACGTCTGGGGCCAAGGGACCACGGTCACCGTCTCCTCA | |
| | | GCCTCCACCAAGGGCCCATCGGTCTTCCCCCTGGCACCCTCCTCCAAG | |
| | | AGCACCTCTGGGGGCACAGCGGCCCTGGGCTGCCTGGTCAAGGACTA | |
| | | CTTCCCCGAACCGGTGACGGTGTCGTGGAACTCAGGCGCCCTGACCA | |
| | | GCGGCGTGCACACCTTCCCGGCTGTCCTACAGTCCTCAGGA | |
| | LC-DNA | GAAATTGTGTTGACACAGTCTCCAGCCACCCTGTCTTTGTCTCCAGGG | 1626 |
| | | GAAAGAGCCACCCTCTCCTGCAGGGCCAGTCAGAGTGTTAGCAGCTA | |
| | | CCTAGCCTGGTACCAACAGAAACCTGGCCAGGCTCCCAGGCTCCTCA | |
| | | TCTATGATGCATCCAACAGGGCCTCTGGCATCCCAGCCAGGTTCAGTG | |
| | | GCAGTGGGTCAGGGACAGACTTCACTCTCACCATCAGCAGCCTAGAG | |
| | | CCTGAAGATTTTGCAGTTTATTACTGTCAGCAACGTCGCAACTGGCCT | |
| | | CTCACTTTCGGCGGAGGGACCAAGGTGGAGACCAAACGAACTGTGGC | |
| | | TGCACCATCTGTCTTCATCTTCCCGCCATCTGATGAGCAGTTGAAATC | |
| | | TGGAACTGCCTCTGTTGTGTGCCTGCTGAATAACTTCTATCCCAGAGA | |
| | | GGCCAAAGTACAGTGGAAGGTGGATAACGC | |
| S24- | HC-DNA | CAGGTGCAGCTGGTGCAGTCTGGGGCTGAGGTGAAGAAGCCTGGGGC | 1627 |
| 278 | | CTCAGTGAAGGTCTCCTGCAAGGCTTCTGGATACACCTTCACCGGCTA | |
| | | CTATATGCACTGGGTGCGACAGGCCCCTGGACAAGGGCTTGAGTGGA | |
| | | TGGGATGGATCAACCCTAACAGTGGTGACACAAACTATGCACAGAAG | |
| | | TTTCAGGGCTGGGTCACCATGACCAGGGACACGTCCCTCAGCACAGC | |
| | | CTACATGGAGCTGAGCAGGCTGAAATCTGACGACACGGCCGTGTATT | |
| | | ACTGTGCGAGAGTAGGGGTTGGTGAATATAGTGGGAGGCACTACTAC | |
| | | TACTACGGTATGGACGTCTGGGGCCAAGGGACCACGGTCACCGTCTC | |
| | | CTCAGCCTCCACCAAGGGCCCATCGGTCTTCCCCCTGGCACCCTCCTC | |
| | | CAAGAGCACCTCTGGGGGCACAGCGGCCCTGGGCTGCCTGGTCAAGG | |
| | | ACTACTTCCCCGAACCGGTGACGGTGTCGTGGAACTCAGGCGCCCTG | |
| | | ACCAGCGGCGTGCACACCTTCCCGGCTGTCCTACAGTCCTCAGGA | |
| | LC-DNA | GAAATTGTGTTGACGCAGTCTCCAGGCACCCTGTCTTTGTCTCCAGGG | 1628 |
| | | GAAAGAGCCACCCTCTCCTGCAGGGCCAGTCAGAGTATTAGCAGCAG | |
| | | CTACTTAGCCTGGTACCAGCAGAAACCTGGCCAGGCTCCCAGGCTCCT | |
| | | CATCTATGGTGCATCCAGCAGGGCCACTGGCATCCCAGACAGGTTCA | |
| | | GTGGCAGTGGGTCTGGGACAGACTTCACTCTCACCATCAGCAGACTG | |
| | | GAGCCTGAAGATTTTGCAGTGTATTACTGTCAGCAGTATGGTAGCTCA | |
| | | CTCACTTTCGGCGGAGGGACCAAGGTGGAGATCAAACGAACTGTGGC | |
| | | TGCACCATCTGTCTTCATCTTCCCGCCATCTGATGAGCAGTTGAAATC | |
| | | TGGAACTGCCTCTGTTGTGTGCCTGCTGAATAACTTCTATCCCAGAGA | |
| | | GGCCAAAGTACAGTGGAAGGTGGATAACGC | |
| S24- | HC-DNA | GAGGTGCAGCTGGTGGAGTCTGGGGGAGGCTTGGTACAGCCAGGGCG | 1629 |
| 339 | | GTCCCTGAGACTCTCCTGTACAGCTTCTGGATTCACCTTTGGTGATTAT | |
| | | GCTATGAGCTGGTTCCGCCAGGCTCCAGGGAAGGGGCTGGAGTGGGT | |
| | | AGGTTTCATTAGAAGCAAAGCTTATGGTGGGACAACACAACACGCCG | |
| | | CCTCTGTGAAAGGCAGATTCACCATCTCAAGAGATGATTCCAAAAGC | |
| | | ATCGCCTATCTGCAAATGAACAGCCTGAAAACCGAGGACACAGCCGT | |
| | | GTATCACTGTGCTAGAGATGGATATGATTGTAGTGGTGGTAGATGCTA | |
| | | CTCCCATATATTTGACTACTGGGGCCAGGGAACCCTGGTCACCGTCTC | |
| | | CTCAGGTGAGTCCTCACCACCCCCTCTCTGAGTCCACTTAGGGAGACT | |
| | | CAGCTTGCCAGGGTCTCAGGGTCAGAGTCTTGTAG | |
| | LC-DNA | GAAATAGTGATGACGCAGTCTCCAGCCACCCTGTCTGTGTCTCCAGGG | 1630 |
| | | GAAAGAGCCACCCTCTCCTGCAGGGCCAGTCAGAGTGTTAGCAGCAA | |
| | | CTTAGCCTGGTACCAGCAGAAACCTGGCCAGGCTCCCAGGCTCCTCAT | |
| | | CTATGGTGCATCCACCAGGGCCACTGGTATCCCAGCCAGGTTCAGTG | |
| | | GCAGTGGGTCTGGGACAGAGTTCACTCTCACCATCAGCAGCCTGCAG | |
| | | TCTGAAGATTTTGCAGTTTATTACTGTCAGCAGTATGATAACTGGTGG | |
| | | ACGTTCGGCCAAGGGACCAAGGTGGAAATCAAACGAACTGTGGCTGC | |
| | | ACCATCTGTCTTCATCTTCCCGCCATCTGATGAGCAGTTGAAATCTGG | |
| | | AACTGCCTCTGTTGTGTGCCTGCTGAATAACTTCTATCCCAGAGAGGC | |
| | | CAAAGTACAGTGGAAGGTGGATAACGC | |
| S24- | HC-DNA | CAGGTGCAGCTGCAGGAGTCGGGCCCAGGACTGGTGAAGCCTTCGGG | 1631 |
| 472 | | GACCCTGTCCCTCACCTGCGCTGTCTCTGGTGGCTCCATCAGCAGTAT | |
| | | TAACTGGTGGAGTTGGGTCCGCCAGCCCCCAGGGAAGGGGCTGGAGT | |
| | | GGATCGGGGAAATCTATCATAGTGGGAACACCAACTATAACCCGTCC | |
| | | CTCAAGAGTCGAGTCACCATATCAGGAGACAAGTCCAAGAACCAGTT | |
| | | CTCCCTGAAGCTGAGCTCTGTGACCGCCGCGGACACGGCCGTGTATTA | |
| | | CTGTGCGAGAGGTTACTATGATAGTAGTCCTTATTACGAGCCACAGG | |
| | | GAATTGACTACTGGGGCCAGGGAATCCTGGTCACCGTCTCCTCAGCCT | |
| | | CCACCAAGGGCCCATCGGTCTTCCCCCTGGCACCCTCCTCCAAGAGCA | |
| | | CCTCTGGGGGCACAGCGGCCCTGGGCTGCCTGGTCAAGGACTACTTC | |
| | | CCCGAACCGGTGACGGTGTCGTGGAACTCAGGCGCCCTGACCAGCGG | |
| | | CGTGCACACCTTCCCGGCTGTCCTACAGTCCTCAGGA | |
| | LC-DNA | CAGCTTGTGCTGACTCAATCGCCCTCTGCCTCTGCCTCCCTGGGAGCC | 1632 |
| | | TCGGTCAAGCTCACCTGCACTCTGAGCAGTGGGCACAGCAGCTACAC | |
| | | CATCGCATGGCATCAGCAGCAGCCAGAGAAGGGCCCTCGGTACTTGA | |
| | | TGAAAGTTAACAGTGATGGCAGCCACACCAAGGGGGACGGGATCCCT | |
| | | GATCGCTTCTCAGGCTCCAGCTCTGGGGCTGAGCGCTACCTCACCATC | |
| | | TCCAGCCTCCAGTCTGAGGATGAGGCTGACTATTACTGTCAGACCTGG | |
| | | GGCACTGGCATTCGAGTATTCGGCGGAGGGACCAAGCTGACCGTCCT | |
| | | AGGTCAGCCCAAGGCTGCCCCCTCGGTCACTCTGTTCCCGCCCTCCTC | |
| | | TGAGGAGCTTCAAGCCAACAAGGCCACACTGGTGTGTCTCATAAGTG | |
| | | ACTTCTACCCGGGAGCCGTGACAGTGGCCTGGAAGGCAGATAGCAGC | |
| | | CCCGTCAAGGCGGGAGTGGAGACCACCACACCCTCCAAACAAAGCAA | |
| | | CAACAAGTACGCGGCCAGCAGCTA | |
| S24- | HC-DNA | CAGGTGCAGCTGGTGCAGTCTGGGGCTGAGGTGAAGAAGCCTGGGGC | 1633 |
| 490 | | CTCAGTGAAGGTTTCCTGCAAGGCATCTGGATACACCTTCACCAGCTA | |
| | | CTTTATTCACTGGGTGCGACAGGCCCCTGGACAAGGGCTTGAGTGGA | |
| | | TGGGAATAATCAACCCTAGTGGTGGTAGCACAAGCTACGCACAGAAG | |
| | | TTCCAGGGCAGAGTCACCATGACCAGGGACACGTCCACGAGCACAGT | |
| | | CTACATGGAGCTGAGCAGCCTGAGATCTGAGGACACGGCCGTGTATT | |
| | | ACTGTGCGAGACACACAACCCCGACAAGATACTTTGACTACTGGGGC | |
| | | CAGGGAACCCTGGTCACCGTCTCCTCAGGGAGTGCATCCGCCCCAAC | |
| | | CCTTTTCCCCCTCGTCTCCTGTGAGAATTCCCCGTCGGATACGAGCAG | |
| | | CGTG | |
| | LC-DNA | GAAATTGTGTTGACGCAGTCTCCAGGCACCCTGTCTTTGTCTCCAGGG | 1634 |
| | | GAAAGAGCCACCCTCTCCTGCAGGGCCAGTCAGAGTGTTACCAGCAG | |
| | | CTACTTAGCCTGGTACCAGCAGAGACGTGGCCAGGCTCCCAGGCTCC | |
| | | TCATCTATGGTGCATCCAGCAGGGCCACTGGCATCCCAGACAGGTTC | |
| | | AGTGGCAGTGGGTCTGGGACAGACTTCACTCTCACCATCAGCAGACT | |
| | | GGAGCCTGAAGATTTTGCAGTGTATTACTGTCAGCAGTATGGTAGCTC | |
| | | ACCTCTCACTTTCGGCGGAGGGACCAAGGTGGAGATCAAACGAACTG | |
| | | TGGCTGCACCATCTGTCTTCATCTTCCCGCCATCTGATGAGCAGTTGA | |
| | | AATCTGGAACTGCCTCTGTTGTGTGCCTGCTGAATAACTTCTATCCCA | |
| | | GAGAGGCCAAAGTACAGTGGAAGGTGGATAACGC | |
| S24- | HC-DNA | CAGCTGCAGCTGCAGGAGTCGGGCCCAGGACTGGTGAAGCCTTCGGA | 1635 |
| 494 | | GACCCTGTCCCTCACCTGCACTGTCTCTGGTGGCTCCATCAGCAGTAG | |
| | | TAGTTACTACTGGGGCTGGATCCGCCAGCCCCCAGGGAAGGGGCTGG | |
| | | AGTGGATTGGGAGTATCTATTATAGTGGGAGCACCTACTACAACCCG | |
| | | TCCCTCAAGAGTCGAGTCACCATATCCGTAGACACGTCCAAGAACCA | |
| | | GTTCTCCCTGAAGCTGAGCTCTGTGACCGCCGCAGACACGGCTGTGTA | |
| | | TTACTGTGCGAGAAAGCCACGTAGTGACTACGGGTACTTCGATCTCTG | |
| | | GGGCCGTGGCACCCTGGTCACTGTCTCCTCAGCCTCCACCAAGGGCCC | |
| | | ATCGGTC | |
| | LC-DNA | GACATCCAGATGACCCAGTCTCCATCCTCCCTGTCTGCATCTGTAGGA | 1636 |
| | | GACAGAGTCACCATCACTTGCCGGGCAAGTCAGAGCATTAGCAGCTA | |
| | | TTTAAATTGGTATCAGCAGAAACCAGGGAAAGCCCCTAAGCTCCTGA | |
| | | TCTATGCTGCATCCAGTTTGCAAAGTGGGGTCCCATCAAGGTTCAGTG | |
| | | GCAGTGGATCTGGGACAGATTTCACTCTCACCATCAGCAGTCTGCAAC | |
| | | CTGAAGATTTTGCAACTTACTACTGTCAACAGAGTTACAGTACCCCTC | |
| | | AACTCACTTTCGGCGGAGGGACCAAGGTGGAGATCAAACGAACTGTG | |
| | | GCTGCACCATCTGTCTTCATCTTCCCGCCATCTGATGAGCAGTTGAAA | |
| | | TCTGGAACTGCCTCTGTTGTGTGCCTGCTGAATAACTTCTATCCCAGA | |
| | | GAGGCCAAAGTACAGTGGAAGGTGGATAACGC | |
| S24- | HC-DNA | GAGGTGCAGCTGGTGGAGTCTGGGGGAGGCTTGGTAAAGCCAGGGCG | 1637 |
| 566 | | GTCCCTGAGACTCTCCTGTACAGCTTCTGGATTCACCTTTGGTGATTAT | |
| | | GCTATGAGCTGGTTCCGCCAGGCTCCAGGGAAGGGGCTGGAGTGGGT | |
| | | AGGTTTCACTAGAAGGAAAGCTTATGGTGGGACAACAGAGTACGCCG | |
| | | CGTCTGTGAAAGGCAGATTCACCATCTCAAGAGATGATTCCAAAAGC | |
| | | ATCGCCTATCTGCAAATGAACAGCCTGAAAACCGAGGACACAGCCGT | |
| | | GTATTACTGTACTAGAATTAAGGTGGGCCGTTTCGATCTTACCGACAG | |
| | | TGGGAGCTACCGATACTTTGACTACTGGGGCCAGGGAACCCTGGTCA | |
| | | CCGTCTCCTCAGCCTCCACCAAGGGCCCATCGGTCTTCCCCCTGGCAC | |
| | | CCTCCTCCAAGAGCACCTCTGGGGGCACAGCGGCCCTGGGCTGCCTG | |
| | | GTCAAGGACTACTTCCCCGAACCGGTGACGGTGTCGTGGAACTCAGG | |
| | | CGCCCTGACCAGCGGCGTGCACACCTTCCCGGCTGTCCTACAGTCCTC | |
| | | AGGA | |
| | LC-DNA | GATATTGTGATGACTCAGTCTCCACTCTCCCTGCCCGTCACCCCTGGA | 1638 |
| | | GAGCCGGCCTCCATCTCCTGCAGGTCTAGTCAGAGCCTCCTGCATAGT | |
| | | AATGGATACAACTATTTGGATTGGTACCTGCAGAAGCCAGGGCAGTC | |
| | | TCCACAGCTCCTGATCTATTTGGGTTCTAATCGGGCCTCCGGGGTCCC | |
| | | TGACAGGTTCAGTGGCAGTGGATCAGGCACAGATTTTACACTGAAAA | |
| | | TCAGCAGAGTGGAGGCTGAGGATGTTGGGGTTTATTACTGCATGCAA | |
| | | CCTCTACAAACTCCTTGGACGTTCGGCCAAGGGACCAAGGTGGAAAT | |
| | | CAAACGAACTGTGGCTGCACCATCTGTCTTCATCTTCCCGCCATCTGA | |
| | | TGAGCAGTTGAAATCTGGAACTGCCTCTGTTGTGTGCCTGCTGAATAA | |
| | | CTTCTATCCCAGAGAGGCCAAAGTACAGTGGAAGGTGGATAACGC | |
| S24- | HC-DNA | GAGGTGCAGCTGGTGGAGTCTGGGGGAGGCTTGGTCCAGCCTGGGGG | 1639 |
| 636 | | GTCCCTGAGACTCTCCTGTGCAGCCTCTGGATTCACCTTAAGTAGCTA | |
| | | TTGGATGAGCTGGGTCCGCCAGGCTCCAGGGAAGGGGCTGGAGTGGG | |
| | | TGGCCAACATAAAGCAAGATGGAAGTGAGAAATACTATGTGGACTCT | |
| | | GTGAAGGGCCGATTCACCATCTCCAGAGACAACGCCAAGAACTCACT | |
| | | GTATCTGCAAATGAACAGCCTGAGAGCCGAGGACACGGCCGTGTATT | |
| | | ACTGTGCGAGAGATCTAACTGCCACCTGGTTCGACCCCTGGGGCCAG | |
| | | GGAACCCTGGTCACCGTCTCCTCAGCACCCACCAAGGCTCCGGATGT | |
| | | GTTCCCCATCATATCAGGGTGCAGACACCCAAAGGATAACAGCCCTG | |
| | | TGGTCCTGGCATGCTTGATAACTGGGTACCACC | |
| | LC-DNA | CAGACTGTGGTGACCCAGGAGCCATCGTTCTCAGTGTCCCCTGGAGG | 1640 |
| | | GACAGTCACACTCACTTGTGGCTTGAGCTCTGGCTCAGTCTCTACTAG | |
| | | TTACTACCCCAGCTGGTACCAGCAGACCCCAGGCCAGGCTCCACGCA | |
| | | CGCTCATCTACAGCACAAACAAACGCTCTTCTGGGGTCCCTGATCGCT | |
| | | TCTCTGGCTCCATCCTTGGGAACAAAGCTGCCCTCACCATCACGGGGG | |
| | | CCCAGGCAGATGATGAATCTGATTATTACTGTGTGCTCTATATGGGTA | |
| | | GTGGCATGTCGGTGTTCGGCGGAGGGACCAAGCTGACCGTCCTAGGT | |
| | | CAGCCCAAGGCTGCCCCCTCGGTCACTCTGTTCCCGCCCTCCTCTGAG | |
| | | GAGCTTCAAGCCAACAAGGCCACACTGGTGTGTCTCATAAGTGACTT | |
| | | CTACCCGGGAGCCGTGACAGTGGCCTGGAAGGCAGATAGCAGCCCCG | |
| | | TCAAGGCGGGAGTGGAGACCACCACACCCTCCAAACAAAGCAACAA | |
| | | CAAGTACGCGGCCAGCAGCTA | |
| S24- | HC-DNA | CAGGTCCAGCTTGTGCAGTCTGGGGCTGAGGTGAAGAAGCCTGGGGC | 1641 |
| 740 | | CTCAGTGAAGGTTTCCTGCAAGGCTTCTGGATACACCTTCACTAGCTA | |
| | | TGCTTTGCATTGGGTGCGCCAGGCCCCCGGACAAAGGCTTGAGTGGA | |
| | | TGGGATGGATCAACGCTGGCAATGGTAACACAAAATATTCACAGAGG | |
| | | TTCCAGGGCAGAGTCACCATTATTAGGGACACATCCGCGAGCACAAC | |
| | | CTACATGGAGCTGAGCAGCCTGAGATCTGAAGACACGGCTGTGTATT | |
| | | ACTGTGCGAGAGGCTATGCCCGAGCCGGGGTTATTACTATCAAAGAA | |
| | | TCACTCCACCACTGGGGCCAGGGCACCCTGGTCACCGTCTCCTCAGCC | |
| | | TCCACCAAGGGCCCATCGGTCTTCCCCCTGGCACCCTCCTCCAAGAGC | |
| | | ACCTCTGGGGGCACAGCGGCCCTGGGCTGCCTGGTCAAGGACTACTT | |
| | | CCCCGAACCGGTGACGGTGTCGTGGAACTCAGGCGCCCTGACCAGCG | |
| | | GCGTGCACACCTTCCCGGCTGTCCTACAGTCCTCAGGA | |
| | LC-DNA | GACATCGTGATGACCCAGTCTCCAGACTCCCTGGCTGTGTCTCTGGGC | 1642 |
| | | GAGAGGGCCACCATCAACTGCAAGTCCAGCCAGAGTGTTTTATACAG | |
| | | CTCCAACAATAAGAACTACTTAGCCTGGTACCAGCAGAAACCAGGAC | |
| | | AGCCTCCTAAGCTGCTCATTTACTGGGCATCTACCCGGGAATCCGGGG | |
| | | TCCCTGACCGATTCAGTGGCAGCGGGTCTGGGACAGATTTCACTCTCA | |
| | | CCATCAGCAGCCTGCAGGCTGAAGATGTGGCAGTTTATTACTGTCAGC | |
| | | AATATTATAGTACTCCTCCCCTCACTTTCGGCGGAGGGACCAAGGTGG | |
| | | AGATCAAACGAACTGTGGCTGCACCATCTGTCTTCATCTTCCCGCCAT | |
| | | CTGATGAGCAGTTGAAATCTGGAACTGCCTCTGTTGTGTGCCTGCTGA | |
| | | ATAACTTCTATCCCAGAGAGGCCAAAGTACAGTGGAAGGTGGATAAC | |
| | | GC | |
| S24- | HC-DNA | CAGGTGCAGCTGCAGGAGTCGGGCCCAGGACTGGTGAAGCCTTCGGA | 1643 |
| 791 | | GACCCTGTCCCTCACCTGCACTGTCTCTGGTGGCTCCATCAGTAGTTC | |
| | | CTACTGGAGCTGGATCCGGCAGCCCCCAGGGAAGGGACTGGAGTGGA | |
| | | TTGGGTATATCTATTACAGTGGGAACACCAACTACAACCCCTCCCTCA | |
| | | AGAGTCGAGTCACCCTATCAATAGACACGTCCAAGAACCAGTTCTCC | |
| | | CTGAAGCTGAGCTCTGTGACCGCTGCGGACACGGCCGTGTATTACTGT | |
| | | GCGTGCAGTGTTACGATTTTTGGAGTGGTTACCCCTGCTTTTGATATCT | |
| | | GGGGCCAAGGGACAATGGTCACCGTCTCTTCAGCCTCCACCAAGGGC | |
| | | CCATCGGTCTTCCCCCTGGCACCCTCCTCCAAGAGCACCTCTGGGGGC | |
| | | ACAGCGGCCCTGGGCTGCCTGGTCAAGGACTACTTCCCCGAACCGGT | |
| | | GACGGTGTCGTGGAACTCAGGCGCCCTGACCAGCGGCGTGCACACCT | |
| | | TCCCGGCTGTCCTACAGTCCTCAGGA | |
| | LC-DNA | GAGATTGTGTTGACGCACTCTCCAGGCACCCTGTCTTTGTCTCCAGGG | 1644 |
| | | GAAAGAGCCACCCTCTCCTGCAGGGCCAGTCAGAGTGTCCGCAGCTA | |
| | | CTTAGCCTGGTACCAGCAGAAACCTGGCCAGGCTCCCAGGCTCCTCAT | |
| | | CTATGGTGCATCCAGCAGGGCCACTGGCATCCCAGACAGGTTCAGTG | |
| | | GCAGTGGGTCTGGGACAGACTTCACTCTCACCATCAGCAGACTGGAG | |
| | | CCTGACGATTTTGCAGTGTATTACTGTCAGCAGTATGGTAGCTCACCT | |
| | | TGGACGTTCGGCCAAGGGACCAAGGTGGAAATCAAACGAACTGTGGC | |
| | | TGCACCATCTGTCTTCATCTTCCCGCCATCTGATGAGCAGTTGAAATC | |
| | | TGGAACTGCCTCTGTTGTGTGCCTGCTGAATAACTTCTATCCCAGAGA | |
| | | GGCCAAAGTACAGTGGAAGGTGGATAACGCCCTCCAATCGGGTAACT | |
| | | CCCAGGAGAGTGTCACAGAGCAGGACAGCAAGGACAGCACCTACAG | |
| | | CCTCAGCAGCACCCTGACGCTGAGCAAAGCAGACTACGAG | |
| S24- | HC-DNA | CAGGTCCAGCTGGTGCAGTCTGGGGCTGAGGTGAAGAAGCCTGGGTC | 1645 |
| 902 | | CTCGGTGAAGGTCTCCTGCAAGGCTTCTGGAGGCACCTTCAGCAGCTA | |
| | | TGCTATCAGCTGGGTGCGACAGGCCCCTGGACAAGGGCTTGAGTGGA | |
| | | TGGGAAGGATCATCCCTATCCTTGGTATAGCAAACTACGCACAGAAG | |
| | | TTCCAGGGCAGAGTCACGATTACCGCGGACAAATCCACGAGCACAGC | |
| | | CTACATGGAGCTGAGCAGCCTGAGATCTGAGGACACGGCCGTGTATT | |
| | | ACTGTGCGAGATGGGATTTTGGAGTGGTTATTCAATACGGTATGGAC | |
| | | GTCTGGGGCCAAGGGACCACGGTCACCGTCTCCTCAGCCTCCACCAA | |
| | | GGGCCCATCGGTCTTCCCCCTGGCACCCTCCTCCAAGAGCACCTCTGG | |
| | | GGGCACAGCGGCCCTGGGCTGCCTGGTCAAGGACTACTTCCCCGAAC | |
| | | CGGTGACGGTGTCGTGGAACTCAGGCGCCCTGACCAGCGGCGTGCAC | |
| | | ACCTTCCCGGCTGTCCTACAGTCCTCAGGACTCTACTCCCTCAGCAGC | |
| | | GTGGTGACCGTGCCCTCCAGCAGCTTGGG | |
| | LC-DNA | CAGGCTGTGGTGACTCAGGAGCCCTCACTGACTGTGTCCCCAGGAGG | 1646 |
| | | GACAGTCACTCTCACCTGTGGCTCCAGCACTGGAGCTGTCACCAGTGG | |
| | | TCATTATCCCTACTGGTTCCAGCAGAAGCCTGGCCAAGCCCCCAGGAC | |
| | | ACTGATTTATGATACAAGCAACAAACACTCCTGGACACCTGCCCGGTT | |
| | | CTCAGGCTCCCTCCTTGGGGGCAAAGCTGCCCTGACCCTTTCGGGTGC | |
| | | GCAGCCTGAGGATGAGGCTGAGTATTACTGCTTGCTCTCCTATAGTGG | |
| | | TTGGGTGTTCGGCGGAGGGACCAAGCTGACCGTCCTAGGTCAGCCCA | |
| | | AGGCTGCCCCCTCGGTCACTCTGTTCCCGCCCTCCTCTGAGGAGCTTC | |
| | | AAGCCAACAAGGCCACACTGGTGTGTCTCATAAGTGACTTCTACCCG | |
| | | GGAGCCGTGACAGTGGCCTGGAAGGCAGATAGCAGCCCCGTCAAGGC | |
| | | GGGAGTGGAGACCACCACACCCTCCAAACAAAGCAACAACAAGTAC | |
| | | GCGGCCAGCAGCTA | |
| S24- | HC-DNA | CAGGTGCAGCTGCAGGAGTCGGGCCCAGGACTGGTGAAGCCTTCGGA | 1647 |
| 921 | | GACCCTGTCCCTCACCTGCACTGTCTCTGGTGGCTCCATCAATAGTTT | |
| | | CTACTGGAACTGGATCCGGCAGCCCCCCGGGAAGGGACTGGAGTGGA | |
| | | TTGGGTATATCTATTACAGTGGGAACACCAAGTACAACCCCTCCCTCA | |
| | | AGAGTCGAGTCACCATATCAGTAGACACGTCCAACAGCCAGTTCTCC | |
| | | CTGAAGCTGAGCTCTGTGACCGCTGCGGACACGGCCGTGTATTACTGT | |
| | | GCGGCGCTCAAAAAGCAGGAGCTGGTATCGTTGCAGGCTTTTGATAT | |
| | | CTGGGGCCAAGGGACAATGGTCACCGTCTCTTCAGCCTCCACCAAGG | |
| | | GCCCATCGGTCTTCCCCCTGGCACCCTCCTCCAAGAGCACCTCTGGGG | |
| | | GCACAGCGGCCCTGGGCTGCCTGGTCAAGGACTACTTCCCCGAACCG | |
| | | GTGACGGTGTCGTGGAACTCAGGCGCCCTGACCAGCGGCGTGCACAC | |
| | | CTTCCCGGCTGTCCTACAGTCCTCAGGA | |
| | LC-DNA | GACATCCAGATGACCCAGTCTCCATCCTCCCTGTCTGCATCTCTGGGA | 1648 |
| | | GACGGGGTCACCATCACTTGCCGGGCAAGTCAGAGCATTAGCAGCTA | |
| | | TTTAAGTTGGTATCAGCAGAAACCCGGGAAAGCCCCTAAGCTCCTGA | |
| | | TCTATGCTGCATCCAGTTTGCAAAGTGGGGTCCCATCAAGGTTCAGTG | |
| | | GCAGTGGATCTGGGACAGATTTCACTCTCACCATCAGCAGTCTGCAAC | |
| | | CTGAAGATTTTGCAACTTACTACTGTCAACAGAGTTACAATACCCCCG | |
| | | TGACGTTCGGCCAAGGGACCAAGGTGGAAATCAAACGAACTGTGGCT | |
| | | GCACCATCTGTCTTCATCTTCCCGCCATCTGATGAGCAGTTGAAATCT | |
| | | GGAACTGCCTCTGTTGTGTGCCTGCTGAATAACTTCTATCCCAGAGAG | |
| | | GCCAAAGTACAGTGGAAGGTGGATAACGCAGATCGGAAGAGC | |
| S24- | HC-DNA | CAGGTGCAGCTGCAGGAGTCGGGCCCAGGACTGGTGAAGCCTTCGGA | 1649 |
| 1063 | | GACCCTGTCCCTCACCTGCACTGTCTCTGGTGGCTCCATCAGTAGTTA | |
| | | CTACTGGAGCTGGATCCGGCAGCCCCCAGGGAAGGGACTGGAGTGGA | |
| | | TTGGATATATCTATTACAGTGGGAGCACCAAGTACAACCCCTCCCTCA | |
| | | AGAGTCGAGTCACCATATCAGTAGACACGTCCAAGAACCAGTTCTCC | |
| | | CTGAAGCTGACCTCTGTGACCGCTGCGGACACGGCCGTGTATTACTGT | |
| | | GCGAGAATCTATGATAGTAGTGGTTATTACCATCCCGTCTTTGACTAC | |
| | | TGGGGCCAGGGAACCCTGGTCACCGTCTCCTCAGCCTCCACCAAGGG | |
| | | CCCATCGGTCTTCCCCCTGGCACCCTCCTCCAAGAGCACCTCTGGGGG | |
| | | CACAGCGGCCCTGGGCTGCCTGGTCAAGGACTACTTCCCCGAACCGG | |
| | | TGACGGTGTCGTGGAACTCAGGCGCCCTGACCAGCGGCGTGCACACC | |
| | | TTCCCGGCTGTCCTACAGTCCTCAGGA | |
| | LC-DNA | GAAATTGTGTTGACGCAGTCTCCAGGCACCCTGTCTTTGTCTCCAGGG | 1650 |
| | | GAAAGAGCCACCCTCTCCTGCAGGGCCAGTCAGAGTGTTAGCAGCAG | |
| | | CTACTTAGCCTGGTACCAGCAGAAACCTGGCCAGGCTCCCAGGCTCCT | |
| | | CATCTATGGTGCATCCAGCAGGGCCACTGACATCCCAGACAGGTTCA | |
| | | GTGGCAGTGGGTCTGGGACAGACTTCACTCTCACCATCAGCAGACTG | |
| | | GAGCCTGAAGATTTTGCAGTGTATTACTGTCAGCAGTATGGTAGCTCA | |
| | | CCGTGGACGTTCGGCCAAGGGACCAAGGTGGAAATCAAACGAACTGT | |
| | | GGCTGCACCATCTGTCTTCATCTTCCCGCCATCTGATGAGCAGTTGAA | |
| | | ATCTGGAACTGCCTCTGTTGTGTGCCTGCTGAATAACTTCTATCCCAG | |
| | | AGAGGCCAAAGTACAGTGGAAGGTGGATAACGC | |
| S24- | HC-DNA | CAGGTGCAGCTGGTGCAGTCTGGGGCTGAGGTGAAGAAGCCTGGGGC | 1651 |
| 1224 | | CTCAGTGAGGGTTTCCTGCAAGGCATCTGGATACACCTTCACCAGCTA | |
| | | CTATATCTACTGGGTGCGACAGGCCCCTGGACAAGGGCTTGAGTGGA | |
| | | TGGGAGTAATCAACCCTAGTGGTGGTAGCACAAGCTACGCACAGAAG | |
| | | TTCCAGGGCAGAGTCACCTTGACCAGGGACACGTCCACGAGCACAGT | |
| | | CTACATGGACCTGAGCAGTCTGAGATCTGAGGACACGGCCGTGTATT | |
| | | ACTGTGCGAGAGATCCTATAATGTGGGAGGTAGTAACTCGGGGGAGG | |
| | | GGCAACTGGTTCGACCCCTGGGGCCAGGGAACCCTGGTCACCGTCTC | |
| | | CTCAGCCTCCACCAAGGGCCCATCGGTCTTCCCCCTGGCACCCTCCTC | |
| | | CAAGAGCACCTCTGGGGGCACAGCGGCCCTGGGCTGCCTGGTCAAGG | |
| | | ACTACTTCCCCGAACCGGTGACGGTGTCGTGGAACTCAGGCGCCCTG | |
| | | ACCAGCGGCGTGCACACCTTCCCGGCTGTCCTACAGTCCTCAGGA | |
| | LC-DNA | CAGTCTGTGCTGACGCAGCCGCCCTCAGTGTCTGGGGCCCCAGGGCA | 1652 |
| | | GAGGGTCACCATCCCCTGCACTGGGAGCAGCTTCAACATCGGGGCAG | |
| | | GTTATGATGTACACTGGTACCAGCAGCTTCCAGGAACAGCCCCCAAA | |
| | | CTCCTCATCTTTGGTAACAGCAATCGGCCCTCAGGGGTCCCTGACCGA | |
| | | TTCTCTGGCTCCAGGTCTGGCACCTCAGCCTCCCTGGCCATCACTGGG | |
| | | CTCCAGGCTGAGGATGAGGCTGATTATTACTGCCAGTCCTATGACAGT | |
| | | AGCCTGAGTGGTGTGGTATTCGGCGGAGGGACTACGCTGACCGTCCT | |
| | | AGGTCAGCCCAAGGCTGCCCCCTCGGTCACTCTGTTCCCGCCCTCCTC | |
| | | TGAGGAGCTTCAAGCCAACAAGGCCACACTGGTGTGTCTCATAAGTG | |
| | | ACTTCTACCCGGGAGCCGTGACAGTGGCCTGGAAGGCAGATAGCAGC | |
| | | CCCGTCAAGGCGGGAGTGGAGACCACCACACCCTCCAAACAAAGCAA | |
| | | CAACAAGTACGCGGCCAGCAGCTACCTGAGCCTGACGCCTGAGCAGT | |
| | | GGAAGTCCCAC | |
| S24- | HC-DNA | GAGGTGCAGCTGGTGGAGTCTGGGGGAGGCTTGGTCCAGCCTGGGGG | 1653 |
| 1271 | | GTCCCTGAGACTCTCCTGTGCAGCCTCTGGATTCACCGTCAGTAGCAA | |
| | | CTACATGAGCTGGGTCCGCCAGGCTCCAGGGAAGGGGCTGGAGTGGG | |
| | | TCTCAGTTATTTATAGCGATGGTAACACATACTATGCAGACTCCGTGA | |
| | | AGGGCAGATTCACCATCTCCAGAGACAATTCCAAGAACATGTTATAT | |
| | | CTTCAAATGAACAGCCTGAGAGCCGAGGACACGGCTGTGTATTACTG | |
| | | TGCGAGAGACCCCGGCCAGGGGTATTGTAGTGGTGGTAGCTGCGCTC | |
| | | CGTCCTATTCTCTTGACTACTGGGGCCAGGGAACCCTGGTCACTGTCT | |
| | | CCTCAGGGAGTGCATCCGCCCCAACCCTTTTCCCCCTCGTCTCCTGTG | |
| | | AGAATTCCCCGTCGGATACGAGCAGCGTG | |
| | LC-DNA | TCCTATGAGCTGACTCAGCCACCCTCAGTGTCCGTGTCCCCAGGACAG | 1654 |
| | | ACAGCCAGCATCACCTGCTCTGGGGATAAATTGGGGGATAGATATGT | |
| | | TTGTTGGTATCAGCAGAAGCCAGGTCAGTCCCCTGTGCTGGTCATCTA | |
| | | TCAAGATACCAAGCGGCCCTCAGGGATCCCTGAGCGATTCTCTGGCTC | |
| | | CAACTCTGGGAACACAGCCACTCTGACCATCAGCGGGACCCAGGCTA | |
| | | TGGATGAGGCTGACTATTACTGTCAGGCGTGGGACAGCAGCACTTGG | |
| | | GTGTTCGGCGGAGGGACCAAGCTGACCGTCCTGGGTCAGCCCAAGGC | |
| | | TGCCCCCTCGGTCACTCTGTTCCCGCCCTCCTCTGAGGAGCTTCAAGC | |
| | | CAACAAGGCCACACTGGTGTGTCTCATAAGTGACTTCTACCCGGGAG | |
| | | CCGTGACAGTGGCCTGGAAGGCAGATAGCAGCCCCGTCAAGGCGGGA | |
| | | GTGGAGACCACCACACCCTCCAAACAAAGCAACAACAAGTACGCGGC | |
| | | CAGCAGCTA | |
| S24- | HC-DNA | GAGGTGCAGCTGGTGGAGTCTGGAGGAGGCTTGGTCCAGCCTGGGGG | 1655 |
| 1339 | | GTCCCTGAGACTCTCCTGTGCAGCCTCTGGGTTCACCGTCAGTAGCAA | |
| | | CTACATGAGCTGGGTCCGCCAGGCTCCAGGGAAGGGGCTGGAGTGGG | |
| | | TCTCAGATATTTATAGCGGTGGTAGCACATACTACGCAGACTCCGTGA | |
| | | AGGGCCGATTCACCATCTCCAGACACAATTCCAAGAACACGCTGTAT | |
| | | CTTCAAATGAACAGCCTGAGAGCTGAGGACACGGCCGTGTATTACTG | |
| | | TGCGAGAGATCGACGGGGATACAGCTATGGTTTGCACCACGGTATGG | |
| | | ACGTCTGGGGCCAAGGGACCACGGTCACCGTCTCCTCAGCCTCCACC | |
| | | AAGGGCCCATCGGTCTTCCCCCTGGCACCCTCCTCCAAGAGCACCTCT | |
| | | GGGGGCACAGCGGCCCTGGGCTGCCTGGTCAAGGACTACTTCCCCGA | |
| | | ACCGGTGACGGTGTCGTGGAACTCAGGCGCCCTGACCAGCGGCGTGC | |
| | | ACACCTTCCCGGCTGTCCTACAGTCCTCAGGA | |
| | LC-DNA | GAAATTGTGTTGACGCAGTCTCCAGGCACCCTGTCTTTGTCTCCAGGG | 1656 |
| | | GAAAGAGCCACCCTCTCCTGCAGGGCCAGTCAGAGTGTTAGCAGCAG | |
| | | CTACTTAGCCTGGTACCAGCAGAAACCTGACCAGGCTCCCAGGCTCCT | |
| | | CATCTATGGTGCATCCAGCAGGGCCACTGGCATCCCAGACAGGTTCA | |
| | | GTGGCAGTGGGTCTGGGACAGACTTCACTCTCACCATCAGCAGACTG | |
| | | GAGCCTGAAGATTTTGCAGTGTATTACTGTCAGCAGTATGGTAGCTCA | |
| | | CCTAACACTTTTGGCCAGGGGACCAAGCTGGAGATCAAACGAACTGT | |
| | | GGCTGCACCATCTGTCTTCATCTTCCCGCCATCTGATGAGCAGTTGAA | |
| | | ATCTGGAACTGCCTCTGTTGTGTGCCTGCTGAATAACTTCTATCCCAG | |
| | | AGAGGCCAAAGTACAGTGGAAGGTGGATAACGC | |
| S24- | HC-DNA | CAGCTGCAGCTGCAGGAGTCGGGCCCAGGACTGGTGAAGCCTTCGGA | 1657 |
| 1345 | | GACCCTGTCCCTCACCTGCACTGTCTCTGGTGGCTCCATCAGCAGTAG | |
| | | TAGTTACTACTGGGGCTGGATCCGCCAGCCCCCAGGGAAGGGGCTGG | |
| | | AGTGGATTGGGAGTATCTATTATAGTGGGAGCACCTACTACAACCCG | |
| | | TCCCTCAAGAGTCGAGTCACCATATCCGTAGACACGTCCAAGAACCA | |
| | | GTTCTCCCTGAAGCTGAGCTCTGTGACCGCCGCAGACACGGCTGTGTA | |
| | | TTACTGTGCGAGACGAATCAGACGCCCCACCTCGGAAGTGGTTATTA | |
| | | CTTATGTCTTTGACTACTGGGGCCAGGGAACCCTGGTCACCGTCTCCT | |
| | | CAGCACCCACCAAGGCTCCGGATGTGTTCCCCATCATATCAGGGTGC | |
| | | AGACACCCAAAGGATAACAGCCCTGTGGTCCTGGCATGCTTGATAAC | |
| | | TGGGTACCACC | |
| | LC-DNA | GCCATCCAGTTGACCCAGTCTCCATCCTCCCTGTCTGCATCTGTAGGA | 1658 |
| | | GACAGAGTCACCATCACTTGCCGGGCAAGTCAGGGCATTAGCAGTGC | |
| | | TTTAGCCTGGTATCAGCAGAAACCAGGGAAAGCTCCTAAGCTCCTGA | |
| | | TCTATGATGCCTCCAGTTTGGAAAGTGGGGTCCCATCAAGGTTCAGCG | |
| | | GCAGTGGATCTGGGACAGATTTCACTCTCACCATCAGCAGCCTGCAG | |
| | | CCTGAAGATTTTGCAACTTATTACTGTCAACAGTTTAATAGTTACCTC | |
| | | ACTTTCGGCGGAGGGACCAAGGTGGAGATCAAACGAACTGTGGCTGC | |
| | | ACCATCTGTCTTCATCTTCCCGCCATCTGATGAGCAGTTGAAATCTGG | |
| | | AACTGCCTCTGTTGTGTGCCTGCTGAATAACTTCTATCCCAGAGAGGC | |
| | | CAAAGTACAGTGGAAGGTGGATAACGCCCTCCAATCGGGTAACTCCC | |
| | | AGGAGAGTGTCACAGAGCAGGACAGCAAGGACAGCACCTACAGCCT | |
| | | CAGC | |
| S24- | HC-DNA | GAGGTGCAGCTGGTGGAGTCTGGAGGAGGCTTGGTCCAGCCTGGGGG | 1659 |
| 1378 | | GTCCCTGAGACTCTCCTGTGCAGCCTCTGGGTTCACCGTCAGTAGCAA | |
| | | CTACATGAGCTGGGTCCGCCAGGCTCCAGGGAAGGGGCTGGAGTGGG | |
| | | TCTCAGTTATTTATAGCGGTGGTAGCACATACTACGCAGACTCCGTGA | |
| | | AGGGCCGATTCACCATCTCCAGACACAATTCCAAGAACACGCTGTAT | |
| | | CTTCAAATGAACAGCCTGAGAGCTGAGGACACGGCCGTGTATTACTG | |
| | | TGCGAGAGAAGGATATTGTACTAATGGTGTATGCTATAGGCATGCTTT | |
| | | TGATATCTGGGGCCAAGGGACAATGGTCACCGTCTCTTCAGGGAGTG | |
| | | CATCCGCCCCAACCCTTTTCCCCCTCGTCTCCTGTGAGAATTCCCCGTC | |
| | | GGATACGAGCAGCGTG | |
| | LC-DNA | CAGACTGTGGTGACCCAGGAGCCATCGTTCTCAGTGTCCCCTGGAGG | 1660 |
| | | GACAGTCACACTCACTTGTGGCTTGAGCTCTGGCTCAGTCTCTACTAG | |
| | | TTACTACCCCAGCTGGTACCAGCAGACCCCAGGCCAGGCTCCACGCA | |
| | | CGCTCATCTACAGCACAAACACTCGCTCTTCTGGGGTCCCTGATCGCT | |
| | | TCTCTGGCTCCATCCTTGGGAACAAAGCTGCCCTCACCATCACGGGGG | |
| | | CCCAGGCAGATGATGAATCTGATTATTACTGTGTGCTGTATATGGGTA | |
| | | GTGGCATTTCGGTGTTCGGCGGAGGGACCAAGCTGACCGTCCTAGGT | |
| | | CAGCCCAAGGCTGCCCCCTCGGTCACTCTGTTCCCGCCCTCCTCTGAG | |
| | | GAGCTTCAAGCCAACAAGGCCACACTGGTGTGTCTCATAAGTGACTT | |
| | | CTACCCGGGAGCCGTGACAGTGGCCTGGAAGGCAGATAGCAGCCCCG | |
| | | TCAAGGCGGGAGTGGAGACCACCACACCCTCCAAACAAAGCAACAA | |
| | | CAAGTACGCGGCCAGCAGCTA | |
| S24- | HC-DNA | CAGGTGCAGCTGCAGGAGTCGGGCCCAGGACTGGTGAAGCCTTCGGA | 1661 |
| 1379 | | GACCCTGTCCCTCACCTGCACTGTCTCTGGTGGCTCCATCAGTAGTTA | |
| | | CTACTGGAGCTGGATCCGGCAGCCCCCAGGGAAGGGACTGGAGTGGA | |
| | | TTGGGTATATCTATTACAGTGGGAGCACCAACTACAACCCCTCCCTCA | |
| | | AGAGTCGAGTCACCATATCAGTAGACACGTCCAAGAACCAGTTCTCC | |
| | | CTGAAGCTGAGCTCTGTGACCGCTGCGGACACGGCCGTGTATTACTGT | |
| | | GCGAGAGATTACTATCAACTCCCTATGGACGTCTGGGGCCAAGGGAC | |
| | | CACGGTCACCGTCTCCTCAGCCTCCACCAAGGGCCCATCGGTCTTCCC | |
| | | CCTGGCACCCTCCTCCAAGAGCACCTCTGGGGGCACAGCGGCCCTGG | |
| | | GCTGCCTGGTCAAGGACTACTTCCCCGAACCGGTGACGGTGTCGTGG | |
| | | AACTCAGGCGCCCTGACCAGCGGCGTGCACACCTTCCCGGCTGTCCTA | |
| | | CAGTCCTCAGGA | |
| | LC-DNA | CAGTCTGTGCTGACTCAGCCACCCTCAGCGTCTGGGACCCCCGGGCA | 1662 |
| | | GAGGGTCACCATCTCTTGTTCTGGAAGCAGCTCCAACATCGGAAGTA | |
| | | ATTATGTATACTGGTACCAGCAGCTCCCAGGAACGGCCCCCAAACTC | |
| | | CTCATCTATAGGAATAATCAGCGGCCCTCAGGGGTCCCTGACCGATTC | |
| | | TCTGGCTCCAAGTCTGGCACCTCAGCCTCCCTGGCCATCAGTGGGCTC | |
| | | CGGTCCGAGGATGAGGCTGATTATTACTGTGCAGCATGGGATGACAG | |
| | | CCTGAGTGGTCGGGTGTTCGGCGGAGGGACCAAGCTGACCGTCCTAG | |
| | | GTCAGCCCAAGGCTGCCCCCTCGGTCACTCTGTTCCCGCCCTCCTCTG | |
| | | AGGAGCTTCAAGCCAACAAGGCCACACTGGTGTGTCTCATAAGTGAC | |
| | | TTCTACCCGGGAGCCGTGACAGTGGCCTGGAAGGCAGATAGCAGCCC | |
| | | CGTCAAGGCGGGAGTGGAGACCACCACACCCTCCAAACAAAGCAAC | |
| | | AACAAGTACGCGGCCAGCAGCTA | |
| S24- | HC-DNA | GAGGTGCAGCTGGTGGAGTCTGGGGGAGGCTTGGTACAGCCTGGGGG | 1663 |
| 1384 | | GTCCCTGAGACTCTCCTGTGCAGTCTCTGGATTCACCTTCAGTAGCTA | |
| | | TAGCATGAACTGGGTCCGCCAGGCTCCAGGGAAGGGGCTGGAGTGGG | |
| | | TTTCATACATTAGTAGTAGTAGTAGTATCATATACTACGCAGACTCTG | |
| | | TGAAGGGCCGATTCACCATCTCCAGAGACAACGCCAAGAACTCACTG | |
| | | TATCTGCAAATGAACAGCCTGAGAGCCGAGGACACGGCTGTGTATTA | |
| | | CTGTGCGAGAGATTTCCTCGACTATAGCAGGTCGTATTCGTACGGTAT | |
| | | GGACGTCTGGGGCCAAGGGACCACGGTCACCGTCTCCTCAGCCTCCA | |
| | | CCAAGGGCCCATCGGTCTTCCCCCTGGCACCCTCCTCCAAGAGCACCT | |
| | | CTGGGGGCACAGCGGCCCTGGGCTGCCTGGTCAAGGACTACTTCCCC | |
| | | GAACCGGTGACGGTGTCGTGGAACTCAGGCGCCCTGACCAGCGGCGT | |
| | | GCACACCTTCCCGGCTGTCCTACAGTCCTCAGGA | |
| | LC-DNA | TCCTATGTGCTGACTCAGCCACCCTCGGTGTCAGTGGCCCCAGGACAG | 1664 |
| | | ACGGCCAGGATTACCTGTGGGGGAGACAACATTGGAAGTAAAAATGT | |
| | | GCACTGGTACCAGCAGAAGCCCGGCCAGGCCCCTGTGCTGGTCGTCT | |
| | | TTGATGATAGCGACCGGCCCTCAGGGATCCCTGAGCGATTCTCTGGCT | |
| | | CCAACTCTGGGAACACGGCCACCCTGACCATCAGCAGGGTCGAAGCC | |
| | | GGGGATGAGGCCGACTATTACTGTCAGGTGTGGGATAGTAGTAGTGA | |
| | | TCACTATGTGGTATTCGGCGGAGGGACCAAGCTGACCGTCCTAGGTC | |
| | | AGCCCAAGGCTGCCCCCTCGGTCACTCTGTTCCCGCCCTCCTCTGAGG | |
| | | AGCTTCAAGCCAACAAGGCCACACTGGTGTGTCTCATAAGTGACTTCT | |
| | | ACCCGGGAGCCGTGACAGTGGCCTGGAAGGCAGATAGCAGCCCCGTC | |
| | | AAGGCGGGAGTGGAGACCACCACACCCTCCAAACAAAGCAACAACA | |
| | | AGTACGCGGCCAGCAGCTACC | |
| S24- | HC-DNA | GAGGTGCAGCTGGTGGAGTCTGGGGGAGGCTTGGTACAGCCAGGGCG | 1665 |
| 1476 | | GTCCCTGAGACTCTCCTGTACAGCTTCTGGATTCACCTTTGGTGATTAT | |
| | | GCTATGAGCTGGTTCCGCCAGGCTCCAGGGAAGGGGCTGGAGTGGGT | |
| | | AGGTTTCATTAGAAGCAAAGCTTATGGTGGGACAACACAATACGCCG | |
| | | CCTCTGTGAAAGGCAGATTCACCATCTCAAGAGATGATTCCAAAAGC | |
| | | ATCGCCTATCTGCAAATGAACAGCCTGAAAACCGAGGACACAGCCGT | |
| | | GTATTACTGTACTAGAGTACGATATTGTACTAATGGTGTATGCTATGG | |
| | | CTACCACTTTGACTACTGGGGCCAGGGAACCGTGGTCACCGTCTCCTC | |
| | | AGCCTCCACC | |
| | LC-DNA | GAAATAGTGATGACGCAGTCTCCAGCCACCCTGTCTGTGTCTCCAGGG | 1666 |
| | | GAAAGAGCCACCCTCTCCTGCAGGGCCAGTCAGAGTGTTAGCAGCAA | |
| | | CTTAGCCTGGTACCAGCAGAAACCTGGCCAGGCTCCCAGGCTCCTCAT | |
| | | CTATGGTGCATCCACCAGGGCCACTGGTATCCCAGCCAGGTTCAGTG | |
| | | GCAGTGGGTCTGGGACAGAGTTCACTCTCACCATCAGCAGCCTGCAG | |
| | | TCTGAAGATTTTGCAGTTTATTACTGTCAGCAGTATAATAACTGGTGG | |
| | | ACGTTCGGCCAAGGGACCAAGGTGGAAATCAAACGAACTGTGGCTGC | |
| | | ACCATCTGTCTTCATCTTCCCGCCATCTGATGAGCAGTTGAAATCTGG | |
| | | AACTGCCTCTGTTGTGTGCCTGCTGAATAACTTCTATCCCAGAGAGGC | |
| | | CAAAGTACAGTGGAAGGTGGATAACGC | |
| S24- | HC-DNA | CAGGTGCAGCTGCAGGAGTCGGGCCCAGGACTGGTGAAGCCTTCGGA | 1667 |
| 1564 | | GACCCTGTCCCTCACCTGCACTGTCTCTGGTGGCTCCATCAGTAGTTA | |
| | | CTACTGGAGCTGGATCCGTCAGCCCCCAGGGAAGGGGCTGGAGTGGA | |
| | | TTGGCTATGTCTATTACAGTGGGAACACCAAATACAACCCCTCCCTCA | |
| | | AGAGTCGAGTCACCATATCAGTAGACACGTCCAAGAACCAGTTCTCC | |
| | | CTGAAGCTGGGCTCTGTGACCGCCGCGGACACGGCCGTTTATTATTGT | |
| | | GCGAGACATTCGAGGATAGAAGTGGCTGGTACTCTAGACTTTGACTA | |
| | | CTGGGGCCAGGGAACCCTGGTCACCGTCTCCTCAGCCTCCACCAAGG | |
| | | GCCCATCGGTCTTCCCCCTGGCACCCTCCTCCAAGAGCACCTCTGGGG | |
| | | GCACAGCGGCCCTGGGCTGCCTGGTCAAGGACTACTTCCCCGAACCG | |
| | | GTGACGGTGTCGTGGAACTCAGGCGCCCTGACCAGCGGCGTGCACAC | |
| | | CTTCCCGGCTGTCCTACAGTCCTCAGGA | |
| | LC-DNA | GACATCCAGATGACCCAGTCTCCATCCTCCCTGTCTGCATCTGTAGGA | 1668 |
| | | GACCGGGTCACCATCACTTGCCGGGCAAGTCAGAGCATTAGAAGCTA | |
| | | TTTAAATTGGTATCAGCAGAAACGAGGGAAAGCCCCTAAGCTCCTGA | |
| | | TCTATGCTGCATCCAGTTTGCAAAGTGGGGTCCCATCAAGGTTCAGTG | |
| | | GCAGTGGATCTGGGACAGATTTCACTCTCACCATCAGCAGTCTGCAAC | |
| | | CTGAAGATTTTGCAACTTACTACTGTCAACAGAGTTACAGTACCCCTC | |
| | | CGACGTTCGGCCAAGGGACCAAGGTGGAAATCAAACGAACTGTGGCT | |
| | | GCACCATCTGTCTTCATCTTCCCGCCATCTGATGAGCAGTTGAAATCT | |
| | | GGAACTGCCTCTGTTGTGTGCCTGCTGAATAACTTCTATCCCAGAGAG | |
| | | GCCAAAGTACAGTGGAAGGTGGATAACGC | |
| S24- | HC-DNA | CAGGTGCAGCTGGTGGAGTCTGGGGGAGGCGTGGTCCAGCCTGGGAG | 1669 |
| 1636 | | GTCCCTGAGACTCTCCTGTGCAGCCTCTGGATTCACCTTCAGTAACTA | |
| | | TGGCATGCACTGGGTCCGCCAGGCTCCAGGCAAGGGGCTGGAGTGGG | |
| | | TGGCCGTTATATGGTATGATGGAAGTAATAAATACTATGCAGACTCC | |
| | | GTGAAGGGCCGATTCACCATCTCCAGAGACAATTCCAAGAACACGCT | |
| | | GTATCTGCAAATGAACAGCCTGAGAGCCGAGGACACGGCTGTGTATT | |
| | | ACTGTGCGAGAGGAGATTGTACTAATGGTGTATGCCATCCCCTTCTAA | |
| | | TTTATTATGATAGTAGTGGTTTAGACTACTGGGGCCAGGGAACCCTGG | |
| | | TCACCGTCTCCTCAGCCTCCACCAAGGGCCCATCGGTCTTCCCCCTGG | |
| | | CACCCTCCTCCAAGAGCACCTCTGGGGGCACAGCGGCCCTGGGCTGC | |
| | | CTGGTCAAGGACTACTTCCCCGAACCGGTGACGGTGTCGTGGAACTC | |
| | | AGGCGCCCTGACCAGCGGCGTGCACACCTTCCCGGCTGTCCTACAGTC | |
| | | CTCAGGA | |
| | LC-DNA | GAAATTGTGTTGACACAGTCTCCAGCCACCCTGTCTTTGTCTCCAGGG | 1670 |
| | | GAAAGAGCCACCCTCTCCTGCAGGGCCAGTCAGAGTGTTAGCAGCTA | |
| | | CTTAGCCTGGTACCAACAGAAACCTGGCCAGGCTCCCAGGCTCCTCAT | |
| | | CTATGATGCATCCAACAGGGCCACTGGCATCCCAGCCAGGTTCAGTG | |
| | | GCAGTGGGTCTGGGACAGACTTCACTCTCACCATCAGCAGCCTAGAG | |
| | | CCTGAAGATTTTGCAGTTTATTACTGTCAGCAGCGTAGCAACTGGCCT | |
| | | CCGATCACTTTCGGCCCTGGGACCAAAGTGGATATCAAACGAACTGT | |
| | | GGCTGCACCATCTGTCTTCATCTTCCCGCCATCTGATGAGCAGTTGAA | |
| | | ATCTGGAACTGCCTCTGTTGTGTGCCTGCTGAATAACTTCTATCCCAG | |
| | | AGAGGCCAAAGTACAGTGGAAGGTGGATAACGCCCTCCAATCGGGTA | |
| | | ACTCCCAGGAGAGTGTCACAGAGCAGGACAGCAAGGACAGCACCTA | |
| | | CAGCCTC | |
| S24- | HC-DNA | CAGGTGCAGCTGGTGGAGTCTGGGGGAGGCGTGGTCCAGCCTGGGAG | 1671 |
| 1002 | | GTCCCTGAGACTCTCCTGTGCAGCCTCTGGATTCACCTTCACTAGCTA | |
| | | TGCTATGCACTGGGTCCGCCAGGCTCCAGGCAAGGGGCTGGAGTGGG | |
| | | TGGCAGTTATATCATATGATGGAGGCAGTAAATACTACGCAGACTCC | |
| | | GTGAAGGGCCGATTCACCATCTCCAGAGACAATTCCAAGAACACGCT | |
| | | GTATCTGCAAATGAACAGCCTGAGAGCTGAGGACACGGCTGTGTATT | |
| | | ACTGTGCGAGGACTACACCGGGTATAACAGCAGCTGGAACAGGGACC | |
| | | CTAGGGAGATACTACTACTACGGTATGGACGTCTGGGGCCAAGGGAC | |
| | | CACGGTCACCGTCTCCTCAGGGAGTGCATCCGCCCCAACCCTTTTCCC | |
| | | CCTCGTCTCCTGTGAGAATTCCCCGTCGGATACGAGCAGCGTG | |
| | LC-DNA | GCCATCCAGTTGACCCAGTCTCCATCCTCCCTGTCTGCATCTGTAGGA | 1672 |
| | | GACAGAGTCACCATCACTTGCCGGGCAAGTCAGGGCATTAGCAGTGC | |
| | | TTTAGCCTGGTATCAGCAGACACCAGGGAAAGCTCCTAAGCTCCTGA | |
| | | TCTATGATGCCTCCAGTTTGGAAAGTGGGGTCCCGTCAAGGTTCAGCG | |
| | | GCAGTGGATCTGGGACAGATTTCTCTCTCACCATCGGCAGCCTGCAGC | |
| | | CTGAAGATTTTGCAAGTTATTACTGTCAACAGTTTAATAGTTACCCTC | |
| | | TCACTTTCGGCGGAGGGACCAAGGTGGAGATCAAACGAACTGTGGCT | |
| | | GCACCATCTGTCTTCATCTTCCCGCCATCTGATGAGCAGTTGAAATCT | |
| | | GGAACTGCCTCTGTTGTGTGCCTGCTGAATAACTTCTATCCCAGAGAG | |
| | | GCCAAAGTACAGTGGAAGGTGGATAACGCCCTCCAATCGGGTAACTC | |
| | | CCAGGAGAGTGTCACAGAGCAGGACAGCAAGGACAGCACCTACAGC | |
| | | CTCAGCAGCACCCTGACGCTGAGCAAAGCAGACTACGAGA | |
| S24- | HC-DNA | CAGGTCCAACTGGTACAGTCTGGGGCTGAGGTGAAGAAGCCTGGGGC | 1673 |
| 1301 | | CTCAGTGAAGGTCTCCTGCAAGGTTTCCGGATACACCCTCATTGAATT | |
| | | ATCCATGCACTGGGTGCGACAGGCTCCTGGAAAAGGGCTTGAGTGGA | |
| | | TGGGAGGTTTTGATCCTGAAGATGGTGAAACAATCTACGCACAGAAG | |
| | | TTCCAGGGCAGAGTCACCATGACCGAGGACACATCTACAGACACAGC | |
| | | CTACATGGCGCTGAGCAGCCTGACATCTGAGGACACGGCCGTGTATT | |
| | | ACTGTGCAACAGCCTACGCGTATTACTATGCTTCGGGGGGTTATTATA | |
| | | CCCTTGACTACTGGGGCCAGGGAACCCTGGTCACCGTCTCCTCAGCCT | |
| | | CCACCAAGGGCCCATCGGTCTTCCCCCTGGCACCCTCCTCCAAGAGCA | |
| | | CCTCTGGGGGCACAGCGGCCCTGGGCTGCCTGGTCAAGGACTACTTC | |
| | | CCCGAACCGGTGACGGTGTCGTGGAACTCAGGCGCCCTGACCAGCGG | |
| | | CGTGCACACCTTCCCGGCTGTCCTACAGTCCTCAGGA | |
| | LC-DNA | CAGGCAGGGCTGACTCAGCCACCCTCGGTGTCCAAGGGCTTGAGACA | 1674 |
| | | GACCGCCACACTCACCTGCACTGGGAGCAGCAACAATGTTGGCAACC | |
| | | AAGGAGCAGCTTGGTTGCAGCAGCACCAGGGCCACCCTCCCAAACTC | |
| | | CTATCCTACAGGAATAACAACCGGCCCTCAGGGATCTCAGAGAGATT | |
| | | CTCTGCATCCAGGTCAGGAAACACAGCCTCCCTGACCATTACTGGACT | |
| | | CCAGCCTGAGGACGAGGCAGACTATTACTGCTCAGCATGGGACAGCA | |
| | | GCCTCTCTAATTGGGTGTTCGGCGGAGGGACCAAGCTGACCGTCCTA | |
| | | GGTCAGCCCAAGGCTGCCCCCTCGGTCACTCTGTTCCCGCCCTCCTCT | |
| | | GAGGAGCTTCAAGCCAACAAGGCCACACTGGTGTGTCTCATAAGTGA | |
| | | CTTCTACCCGGGAGCCGTGACAGTGGCCTGGAAGGCAGATAGCAGCC | |
| | | CCGTCAAGGCGGGAGTGGAGACCACCACACCCTCCAAACAAAGCAAC | |
| | | AACAAGTACGCGGCCAGCAGCTA | |
| S24- | HC-DNA | CAGATCACCTTGAAGGAGTCTGGTCCTACGCTGGTGAAACCCACACA | 1675 |
| 223 | | GACCCTCACGCTGACCTGCACCTTCTCTGGGTTCTCACTCAACACTAG | |
| | | TGGAGTGGGTGTGGGCTGGATCCGTCAGCCCCCAGGAAAGGCCCTGG | |
| | | AGTGGCTTGCACTCATTTATTGGGATGATGATAAGCGCTACAGCCCAT | |
| | | CTCTGAAGAGCAGGCTCACCATCACCAAGGACACCTCCAAAAACCAG | |
| | | GTGGTCCTTACAATGACCAACATGGACCCTGTGGACACAGCCACATA | |
| | | TTACTGTGCACACCATACGATTGTTCCAATTTTTGACTACTGGGGCCA | |
| | | GGGAACCCTGGTCACCGTCTCCTCAGGGAGTGCATCCGCCCCAACCCT | |
| | | TTTCCCCCTCGTCTCCTGTGAGAATTCCCCGTCGGATACGAGCAGCGT | |
| | | G | |
| | LC-DNA | CAGTCTGCCCTGACTCAGCCTGCCTCCGTGTCTGGGTCTCCTGGACAG | 1676 |
| | | TCGATCACCATCTCCTGCACTGGAACCAGCAGTGACGTTGGTGGTTAT | |
| | | AACTATGTCTCCTGGTACCAACAACACCCAGGCAAAGCCCCCAAACT | |
| | | CATGATTTATGATGTCAGTAATCGGCCCTCAGGGGTTTCTAATCGCTT | |
| | | CTCTGGCTCCAAGTCTGGCAACACGGCCTCCCTGACCATCTCTGGGCT | |
| | | CCAGGCTGAGGACGAGGCTGATTATTACTGCAACTCATATACAAGCA | |
| | | GCAGCACTCTCGTGGTATTCGGCGGAGGGACCAAGCTGACCGTCCTA | |
| | | GGTCAGCCCAAGGCTGCCCCCTCGGTCACTCTGTTCCCGCCCTCCTCT | |
| | | GAGGAGCTTCAAGCCAACAAGGCCACACTGGTGTGTCTCATAAGTGA | |
| | | CTTCTACCCGGGAGCCGTGACAGTGGCCTGGAAGGCAGATAGCAGCC | |
| | | CCGTCAAGGCGGGAGTGGAGACCACCACACCCTCCAAACAAAGCAAC | |
| | | AACAAGTACGCGGCCAGCAGCTATCTGAGCCTGACGCC | |
| S24- | HC-DNA | CAGGTGCAGCTGCAGGAGTCGGGCCCAGGACTGGTGAAGCCTTCGGA | 1677 |
| 461 | | GACCCTGTCCCTCACGTGCACTGTCTCTGGTGGCTCCATCAGTAGTTA | |
| | | CTACTGGAGCTGGATCCGGCAGCCCCCCGGGAAGGGACTGGAGTGGA | |
| | | TTGGGAATATCTATAACAGTGGGAGCACCAACTACAACCCCTCCCTC | |
| | | AAGAGTCGACTCACCATATCAGTTGACACGTCCAAGAACCACTTCTCC | |
| | | CTGAAGCTGAGCTCTGTGACCGCTGCGGACACGGCCGTGTATTACTGT | |
| | | GCGAGAGGAGGACTAGAGCACGACGGTGACTACGTCTACTACTACGG | |
| | | TATGGACGTCTGGGGCCAAGGGACCACGATCACCGTCTCCTCAGCCT | |
| | | CCACCAAGGGCCCATCGGTCTTCCCCCTGGCACCCTCCTCCAAGAGCA | |
| | | CCTCTGGGGGCACAGCGGCCCTGGGCTGCCTGGTCAAGGACTACTTC | |
| | | CCCGAACCGGTGACGGTGTCGTGGAACTCAGGCGCCCTGACCAGCGG | |
| | | CGTGCACACCTTCCCGGCTGTCCTACAGTCCTCAGGA | |
| | LC-DNA | TCCTATGAGCTGACACAGCCACCCTCGGTGTCAGTGTCCCTAGGACAG | 1678 |
| | | ATGGCCAGGATCACCTGCTCTGGAGAAGCATTGCCAAAAAAATATGC | |
| | | TTATTGGTACCAGCAGAAGCCAGGCCAGTTCCCTATACTGGTGATATA | |
| | | TAAAGACAGCGAGAGGCCCTCAGGGATCCCTGAGCGATTCTCTGGCT | |
| | | CCAGCTCAGGGACAATAGTCACATTGACCATCAGTGGAGTCCAGGCA | |
| | | GAAGACGAGGCTGACTATTACTGTCTATCAGAAGACAGCAGTGGTAC | |
| | | TTGGGTGTTCGGCGGAGGGACCAAGCTGACCGTCCTAGGTCAGCCCA | |
| | | AGGCTGCCCCCTCGGTCACTCTGTTCCCGCCCTCCTCTGAGGAGCTTC | |
| | | AAGCCAACAAGGCCACACTGGTGTGTCTCATAAGTGACTTCTACCCG | |
| | | GGAGCCGTGACAGTGGCCTGGAAGGCAGATAGCAGCCCCGTCAAGGC | |
| | | GGGAGTGGAGACCACCACACCCTCCAAACAAAGCAACAACAAGTAC | |
| | | GCGGCCAGCAGCTA | |
| S24- | HC-DNA | CAGGTGCAGCTGGTGGAGTCTGGGGGAGGCGTGGTCCAGCCTGGGAG | 1679 |
| 511 | | GTCCCTGAGACTCTCCTGTGCAGCCTCTGGATTCACCTTCAGTAGCTA | |
| | | TGGCATGCACTGGGTCCGCCAGGCTCCAGGCAAGGGGCTGGAGTGGG | |
| | | TGGCAGTTATATCATATGATGGAAGTAATAAATACTATGCAGACTCC | |
| | | GTGAAGGGCCGATTCACCATCTCCAGAGACAATTCCAAGAACACGCT | |
| | | GTATCTGCAAATGAACAGCCTGAGAGCTGAGGACACGGCTGTGTATT | |
| | | ACTGTGCGAAATATACGTCAACGGTAACTACGAACTACTACTACGGT | |
| | | ATGGACGTCTGGGGCCAAGGGACCACGGTCACCGTCTCCTCAGCACC | |
| | | CACCAAGGCTCCGGATGTGTTCCCCATCATATCAGGGTGCAGACACC | |
| | | CAAAGGATAACAGCCCTGTGGTCCTGGCATGCTTGATAACTGGGTAC | |
| | | CACC | |
| | LC-DNA | TCCTATGAGCTGACTCAGCCACCCTCAGTGTCCGTGTCCCCAGGACAG | 1680 |
| | | ACAGCCAGCATCACCTGCTCTGGAGATAAATTGGGGGATAAATATGC | |
| | | TTGCTGGTATCAGCAGAAGCCAGGCCAGTCCCCTGTGCTGGTCATCTA | |
| | | TCAAGATAGCAAGCGGCCCTCAGGGATCCCTGAGCGATTCTCTGGCT | |
| | | CCAACTCTGGGAACACAGCCACTCTGACCATCAGCGGGACCCAGGCT | |
| | | ATGGATGAGGCTGACTATTACTGTCAGGCGTGGGACAGCAGCACTGT | |
| | | GGTATTCGGCGGAGGGACCAAGCTGACCGTCCTAGGTCAGCCCAAGG | |
| | | CTGCCCCCTCGGTCACTCTGTTCCCGCCCTCCTCTGAGGAGCTTCAAG | |
| | | CCAACAAGGCCACACTGGTGTGTCTCATAAGTGACTTCTACCCGGGA | |
| | | GCCGTGACAGTGGCCTGGAAGGCAGATAGCAGCCCCGTCAAGGCGGG | |
| | | AGTGGAGACCACCACACCCTCCAAACAAAGCAACAACAAGTACGCG | |
| | | GCCAGCAGCTACC | |
| S24- | HC-DNA | CAGGTGCAGCTGGTGGAGTCTGGGGGAGGCGTGGTCCAGCCTGGGAG | 1681 |
| 788 | | GTCCCTGAGACTCTCCTGTGCAGCGTCTGGATTCACCTTCAGTAGCTA | |
| | | TGGCATGCACTGGGTCCGCCAGGCTCCAGGCAAGGGGCTGGAGTGGG | |
| | | TGGCAGTTATATGGTATGATGGAAGTAATAAATACTATGCAGACTCC | |
| | | GTGAAGGGCCGATTCACCATCTCCAGAGACAATTCCAAGAACACGCT | |
| | | GTATCTGCAAATGAACAGCCTGAGAGCCGAGGACACGGCTGTGTATT | |
| | | ACTGTGCGAGAGGACGTTCCCCAGGTGGGGGCCACTACTACGGTATG | |
| | | GACGTCTGGGGCCAAGGGACCACGGTCACCGTCTCCTCAGGGAGTGC | |
| | | ATCCGCCCCAACCCTTTTCCCCCTCGTCTCCTGTGAGAATTCCCCGTCG | |
| | | GATACGAGCAGCGTG | |
| | LC-DNA | TCCTATGAGCTGACTCAGCCACCCTCAGTGTCCGTGTCCCCAGGACAG | 1682 |
| | | ACAGCCAGCATCACCTGCTCTGGAGATAAATTGGGGGATAAATATGC | |
| | | TTGCTGGTATCAGCAGAAGCCAGGCCAGTCCCCTGTGCTGGTCATCTA | |
| | | TCAAGATAGCAAGCGGCCCTCAGGGATCCCTGAGCGATTCTCTGGCT | |
| | | CCAACTCTGGGAACACAGCCACTCTGACCATCAGCGGGACCCAGGCT | |
| | | ATGGATGAGGCTGACTATTACTGTCAGGCGTGGGACAGCAGCTCTGT | |
| | | GGTATTCGGCGGAGGGACCAAGCTGACCGTCCTAGGTCAGCCCAAGG | |
| | | CTGCCCCCTCGGTCACTCTGTTCCCGCCCTCCTCTGAGGAGCTTCAAG | |
| | | CCAACAAGGCCACACTGGTGTGTCTCATAAGTGACTTCTACCCGGGA | |
| | | GCCGTGACAGTGGCCTGGAAGGCAGATAGCAGCCCCGTCAAGGCGGG | |
| | | AGTGGAGACCACCACACCCTCCAAACAAAGCAACAACAAGTACGCG | |
| | | GCCAGCAGCTA | |
| S24- | HC-DNA | CAGGTCACCTTGAGGGAGTCTGGTCCTGCGCTGGTGAAACCCACACA | 1683 |
| 821 | | GACCCTCACACTGACCTGCACCTTCTCTGGGCTCTCACTCAGCAGTAG | |
| | | TGGAATGTGTGTGAGCTGGATCCGTCAGCCCCCAGGGAAGGCCCTGG | |
| | | AGTGGCTTGCACGCATTGATTGGGATGATGATAAATACTACAGCACA | |
| | | TCTCTGAAGACCAGGCTCACCATCTCCAAGGACACCTCCAAAAATCA | |
| | | GGTGGTCCTTACAATGACCAACATGGACCCTGTGGACACAGCCACGT | |
| | | ATTACTGTGCACGGATATGTACTATGGTTCGGGGACTCCATGATGCTT | |
| | | TTGATATCTGGGGCCAAGGGACAATGGTCACCGTCTCTTCAGGGAGT | |
| | | GCATCCGCCCCAACCCTTTTCCCCCTCGTCTCCTGTGAGAATTCCCCGT | |
| | | CGGATACGAGCAGCGTG | |
| | LC-DNA | GACATCCAGATGACCCAGTCTCCTTCCACCCTGTCTGCATCTGTAGGA | 1684 |
| | | GACAGAGTCACCATCACTTGCCGGGCCAGTCAGAGTATTAGTAGCTG | |
| | | GTTGGCCTGGTATCAGCAGAAACCAGGGAAAGCCCCTAAGCTCCTGA | |
| | | TCTATAAGGCGTCTAGTTTAGAAAGTGGGGTCCCATCAAGGTTCAGC | |
| | | GGCAGTGGATCTGGGACAGAATTCACTCTCACCATCAGCAGCCTGCA | |
| | | GCCTGATGATTTTGCAACTTATTACTGCCAACAGTATAATAGTTATTC | |
| | | GTGGACGTTCGGCCAAGGGACCAAGGTGGAAATCAAACGAACTGTGG | |
| | | CTGCACCATCTGTCTTCATCTTCCCGCCATCTGATGAGCAGTTGAAAT | |
| | | CTGGAACTGCCTCTGTTGTGTGCCTGCTGAATAACTTCTATCCCAGAG | |
| | | AGGCCAAAGTACAGTGGAAGGTGGATAACGC | |
| S144- | HC-DNA | GAGGTGCAGCTGGTGCAGTCTGGAGCAGAGGTGAAAAAGCCCGGGG | 1685 |
| 67 | | AGTCTCTGAAGATCTCCTGTAAGGGTTCTGGATACAGCTTTACCACCT | |
| | | ACTGGATCGCCTGGGTGCGCCAGATGCCCGGGAAAGGCCTGGAGTGG | |
| | | GTGGGGATCATCTATCCTGATGACTCTGATACCAGATACAGCCCGTCC | |
| | | TTCCAAGGCCAGGTCACCATCTCAGCCGACAAGTCCATCGGTACCGC | |
| | | CTACCTGCAGTGGAGTAGCCTGAAGGCCTCGGACACCGCCATGTATT | |
| | | ACTGTGCGAGGGGCCAGTATTACGATTTTTGGAGCGGAGCCGGAGGT | |
| | | GTGGACGTCTGGGGCCAAGGGACCACGGTCACCGTCTCCTCAGCCTC | |
| | | CACCAAGGGCCCATCGGTCTTCCCCCTGGCACCCTCCTCCAAGAGCAC | |
| | | CTCTGGGGGCACAGCGGCCCTGGGCTGCCTGGTCAAGGACTACTTCC | |
| | | CCGAACCGGTGACGGTGTCGTGGAACTCAGGCGCCCTGACCAGCGGC | |
| | | GTGCACACCTTCCCGGCTGTCCTACAGTCCTCAGGA | |
| | LC-DNA | CAGTCTGTGCTGACGCAGCCGCCCTCAGTGTCTGGGGCCCCAGGGCA | 1686 |
| | | GAGGGTCACCATCTCTTGCACTGGGAGCAGGTCCAACATCGGGGCAG | |
| | | GTTATGATGTACAGTGGTACCAGCAGGTTCCAGGAACAGCCCCCAAA | |
| | | CTCCTCATCTCTGGTAACAGCAATCGGCCCTCAGGGGTCCCTGACCGA | |
| | | TTCTCTGGCTCCAAGTCTGGCACCTCAGCCTCCCTGGCCATCACTGGG | |
| | | CTCCAGGCTGAGGATGAGGCTGATTATTACTGCCAGTCCTATGACAGC | |
| | | AGCCTGAGTGGTCTGAGGGTATTCGGCGGAGGGACCAAGCTGACCGT | |
| | | CCTAGGTCAGCCCAAGGCTGCCCCCTCGGTCACTCTGTTCCCGCCCTC | |
| | | CTCTGAGGAGCTTCAAGCCAACAAGGCCACACTGGTGTGTCTCATAA | |
| | | GTGACTTCTACCCGGGAGCCGTGACAGTGGCCTGGAAGGCAGATAGC | |
| | | AGCCCCGTCAAGGCGGGAGTGGAGACCACCACACCCTCCAAACAAAG | |
| | | CAACAACAAGTACGCGGCCAGCAGCTATCTGAGCCTGACGCCTGAGC | |
| | | AGTGGAAGTCCCAC | |
| S144- | HC-DNA | GAGGTGCAGCTGGTGCAGTCTGGAGCAGAGGTGAAAAAGCCCGGGG | 1687 |
| 69 | | AGTCTCTGAAGATCTCCTGTAAGGGTTCTGGATACAGCTTTACCAGCT | |
| | | ACTGGATCGGCTGGGTGCGCCAGATGCCCGGGAAAGGCCTGGAGTGG | |
| | | ATGGGGATCATCTATCCTGGTGACTCTGATACCAGATACAGCCCGTCC | |
| | | TTCCAAGGCCAGGTCACCATCTCAGCCGACAAGTCCATCACTACCGCC | |
| | | TACCTGCAGTGGAGCAGCCTGAAGGCCTCGGACACCGCCATGTATTA | |
| | | CTGTGCGAGGACCCAGACTACGAACTGGTTCGACTCCTGGGGCCAGG | |
| | | GAACCCTGGTCACCGTCTCCTCAGCCTCCACCAAGGGCCCATCGGTCT | |
| | | TCCCCCTGGCACCCTCCTCCAAGAGCACCTCTGGGGGCACAGCGGCC | |
| | | CTGGGCTGCCTGGTCAAGGACTACTTCCCCGAACCGGTGACGGTGTC | |
| | | GTGGAACTCAGGCGCCCTGACCAGCGGCGTGCACACCTTCCCGGCTG | |
| | | TCCTACAGTCCTCAGGA | |
| | LC-DNA | GACATCCAGATGACCCAGTCTCCTTCCACCCTGTCTGTATCTGTAGGA | 1688 |
| | | GACAGAGTCACCATCACTTGCCGGGCCAGTCAGAGTGTTAGTAGCTG | |
| | | GTTGGCCTGGTATCAGCAGAAACCAGGGAAAGCCCCTAAGCTCCTGA | |
| | | TCTATGATGCCTCCAGTTTGGAAAGTGGGGTCCCATCAAGGTTCAGCG | |
| | | GCAGTGGATCTGGGACAGAATTCACTCTCACCATTAGCAGCCTGCAG | |
| | | CCTGATGATTTTGCAACTTATTACTGCCAACAGTATAATAGTTTCTAC | |
| | | ACTTTTGGCCAGGGGACCAAGCTGGAGATCAAACGAACTGTGGCTGC | |
| | | ACCATCTGTCTTCATCTTCCCGCCATCTGATGAGCAGTTGAAATCTGG | |
| | | AACTGCCTCTGTTGTGTGCCTGCTGAATAACTTCTATCCCAGAGAGGC | |
| | | CAAAGTACAGTGGAAGGTGGATAACGCCCTCCAATCGGGTAACTCCC | |
| | | AGGAGAGTGTCACAGAGCAGGACAGCAAGGACAGCACCTACAGCCT | |
| | | CAGCAGCACCCTGACGCTGAGCAAAGCAGACTACGAGAA | |
| S144- | HC-DNA | CAGGTGCAGCTGGTGGAGTCTGGGGGAGGCGTGGTCCAGCCTGGGGG | 1689 |
| 94 | | GTCCCTGAGACTCTCCTGTGCAGCGTCTGGATTCACCTTCAGTAGCTA | |
| | | TGGCATGCACTGGGTCCGCCAGGCTCCAGGCAAGGGGCTGGAGTGGG | |
| | | TGACATTTACACGGTATGATGGAAGTAATAAGTTCTATGCAGACTCCG | |
| | | TGAAGGGCCGATTCTCCATCTCCAGAGACAATTCCAAGAACACGTTG | |
| | | TATCTGCAAATGAATAGTCTGAGAGCTGAGGACACGGCTGTATACTA | |
| | | CTGCGCGAAAGAAAGTCGTGTGGCGTTTGGGGGAGCTATCGCCATCT | |
| | | ACTACTTCGGTATGGACGTCTGGGGCCAAGGGACCACGGTCACCGTC | |
| | | TCCTCAGCCTCCACCAAGGGCCCATCGGTCTTCCCCCTGGCGCCCTGC | |
| | | TCCAGGAGCACCTCTGGGGGCACAGCGGCCCTGGGCTGCCTGGTCAA | |
| | | GGACTACTTCCCCGAACCGGTGACGGTGTCGTGGAACTCAGGCGCCC | |
| | | TGACCAGCGGCGTGCACACCTTCCCGGCTGTCCTACAGTCCTCAGGA | |
| | LC-DNA | GATATTGTGATGACTCAGTCTCCACTCTCCCTGCCCGTCACCCCTGGA | 1690 |
| | | GAGCCGGCCTCCATCTCCTGCAGGTCTAGTCAGAGCCTCCTGCATAGT | |
| | | AATGGATACAACTATTTGGATTGGTACCTGCAGAAGCCAGGGCAGTC | |
| | | TCCACAGCTCCTGATCTATTTGGGTTCTAATCGGGCCTCCGGGGTCCC | |
| | | TGACAGGTTCAGTGGCAGTGGATCAGGCACAGATTTTACACTGAAAA | |
| | | TCAGCAGAGTGGAGGCTGAGGATGTTGGGGTTTATTACTGCATGCAA | |
| | | GCTCTACAAACTCCTCAGTACACTTTTGGCCAGGGGACCAAGCTGGA | |
| | | GATCAAACGAACTGTGGCTGCACCATCTGTCTTCATCTTCCCGCCATC | |
| | | TGATGAGCAGTTGAAATCTGGAACTGCCTCTGTTGTGTGCCTGCTGAA | |
| | | TAACTTCTATCCCAGAGAGGCCAAAGTACAGTGGAAGGTGGATAACG | |
| | | CCCTCCAATCGGGTAACTCCCAGGAGAGTGTCACAGAGCAGGACAGC | |
| | | AAGGACAGCACCTACAGCCTCAGCAGCACCCTGACGCTGAGCAAAGC | |
| | | AGACTACGAGAA | |
| S144- | HC-DNA | GAGGTGCAGTTATTGGAGTCTGGGGGAGGCTTGGTACAGCCTGGGGG | 1691 |
| 113 | | GTCCCTGAGACTCTCCTGTGCAGCCTCTGGATTCACCTTTAGCAACTA | |
| | | TGCCATGAGCTGGGTCCGCCAGGCTCCAGGGAAGGGGCTGGAGTGGG | |
| | | TCTCAGCTATTCGTAATAGTGGTAGTAGCACATACTATGCTGACTCCG | |
| | | TGAAGGGCCGGTTCACCATCTCCAGAGACAATTCCAAGAACACGCTG | |
| | | TATCTGCAAATGAACAGCCTGAGAGCCGAGGACTCGGCCGTATATTA | |
| | | CTGTGCGAAAGTAGGGGGGACAGCAGCTGGTCATCCGTTTTATGACT | |
| | | ACTGGGGCCAGGGAACCCTGGTCACCGTCTCCTCAGCCTCCACCAAG | |
| | | GGCCCATCGGTCTTCCCCCTGGCACCCTCCTCCAAGAGCACCTCTGGG | |
| | | GGCACAGCGGCCCTGGGCTGCCTGGTCAAGGACTACTTCCCCGAACC | |
| | | GGTGACGGTGTCGTGGAACTCAGGCGCCCTGACCAGCGGCGTGCACA | |
| | | CCTTCCCGGCTGTCCTACAGTCCTCAGGACTC | |
| | LC-DNA | GACATCCAGATGACCCAGTCTCCATCCTCCCTGTCTGCATCTGTAGGA | 1692 |
| | | GACAGAGTCACCATCACTTGCCGGGCAAGTCAGAGCATTAGCAACTA | |
| | | TTTAAATTGGTATCAGCAGAAACCAGGGAAAGCCCCTGACCTCCTGA | |
| | | TCTATGCTGCATCCAGTTTGCAAAGTGGGGTCCCATTAAGGTTCAGTG | |
| | | GCAGTGGATCTGGGACAGATTTCACTCTCACCATCAGCAGTCTGCAAC | |
| | | CTGAAGATTTTGCAACTTACTACTGTCAACAGACTTACAGTGCCCCCA | |
| | | CTTTCGGCGGAGGGACCAAGGTGGAGATCAAACGAACTGTGGCTGCA | |
| | | CCATCTGTCTTCATCTTCCCGCCATCTGATGAGCAGTTGAAATCTGGA | |
| | | ACTGCCTCTGTTGTGTGCCTGCTGAATAACTTCTATCCCAGAGAGGCC | |
| | | AAAGTACAGTGGAAGGTGGATAACGCCCTCCAATCGGGTAACTCCCA | |
| | | GGAGAGTGTCACAGAGCAGGACAGCAAGGACAGCACCTACAGCCTC | |
| | | AGCAGCACCCTGACGCTGAGCAAAGCAGACTACGAGAA | |
| S144- | HC-DNA | CAGGTGCAGCTGGTGCAGTCTGGGGCTGAGGTGAAGAAGCCTGGGGC | 1693 |
| 175 | | CTCAGTGAAGGTCTCCTGCAAGGCTTCTGGATACACCTTCACCGGCTA | |
| | | CTATATGCACTGGGTGCGACAGGCCCCTGGACAAGGTCTTGAGTGGA | |
| | | TGGGACGGATCAACCCTAACAGTGGTGGCACAAACTTTGCACAGAGG | |
| | | TTTCAGGGCAGGGTCTCCATGACCAGGGACACCTCCATCAGCACAGC | |
| | | CTACATGGAACTGAGCAGCCTGAGATCTGACGACACGGCCGTATATT | |
| | | ACTGTGCGAGAGGCGCAAAATTCGAGCACCTCCCTTTTGATATCTGGG | |
| | | GCCAAGGGACAATGGTCACCGTCTCTTCAGCCTCCACCAAGGGCCCA | |
| | | TCGGTCTTCCCCCTGGCACCCTCCTCCAAGAGCACCTCTGGGGGCACA | |
| | | GCGGCCCTGGGCTGCCTGGTCAAGGACTACTTCCCCGAACCGGTGAC | |
| | | GGTGTCGTGGAACTCAGGCGCCCTGACCAGCGGCGTGCACACCTTCC | |
| | | CGGCTGTCCTACAGTCCTCAGGA | |
| | LC-DNA | CAGTCTATGCTGACTCAGCCACCCTCAGCGTCTGGGACCCCCGGGCA | 1694 |
| | | GAGGGTCACCATCTCTTGTTCTGGAAGCAGCTCCAACATCGGAAGTA | |
| | | ATTATGTATACTGGTACCAGCAGCTCCCAGGAACGGCCCCCAAACTC | |
| | | CTCATCTATAGGAATAATCAGCGGCCCTCAGGGGTCCCTGACCGATTC | |
| | | TCTGGCTCCAAGTCTGGCACCTCAGCCTCCCTGGCCATCAGTGGGCTC | |
| | | CGGTCCGAGGATGAGGCTGATTATTACTGTGCAGCATGGGATGACAG | |
| | | ACGTTGGGTGTTCGGCGGAGGGACCAAGCTGACCGTCCTAGGTCAGC | |
| | | CCAAGGCTGCCCCCTCGGTCACTCTGTTCCCACCCTCCTCTGAGGAGC | |
| | | TTCAAGCCAACAAGGCCACACTGGTGTGTCTCATAAGTGACTTCTACC | |
| | | CGGGAGCCGTGACAGTGGCCTGGAAGGCAGATAGCAGCCCCGTCAAG | |
| | | GCGGGAGTGGAGACCACCACACCCTCCAAACAAAGCAACAACAAGT | |
| | | ACGCGGCCAGCAGCTA | |
| S144- | HC-DNA | CAGGTGCAACTGGTGCAGTCTGGGGCTGAGGTGAAGAAGCCTGGGGC | 1695 |
| 208 | | CTCAGTGAAGGTCTCCTGCAAGTCTTCTGGATACACCTTCACCGGCTA | |
| | | CTATATGCACTGGGTGCGACAGGCCCCTGGACAAGGGCTTGAGTGGA | |
| | | TGGGACGGATCAACCCTAATAGTGGTGGCACAAACTATGCACAGAAG | |
| | | TTTCAGGGCAGGGTCACCATGACCAGGGACACGTCCATCAGCACAGC | |
| | | CTACATGGAACTGAGCAGGCTGAGATCTGACGACACGGCCGTATATT | |
| | | ACTGTGCGAGAGGGGCCCGAGGTGGCGCGGGGTGCAGTGGCTGGTCA | |
| | | TGTTTTGACTTCTGGGGCCAGGGAACCCTGGTCACCGTCTCCTCAGCC | |
| | | TCCACCAAGGGCCCATCGGTCTTCCCCCTGGCACCCTCCTCCAAGAGC | |
| | | ACCTCTGGGGGCACAGCGGCCCTGGGCTGCCTGGTCAAGGACTACTT | |
| | | CCCCGAACCGGTGACGGTGTCGTGGAACTCAGGCGCCCTGACCAGCG | |
| | | GCGTGCACACCTTCCCGGCTGTCCTACAGTCCTCAGGA | |
| | LC-DNA | CAGTCTGCCCTGACTCAGCCTCGCTCAGTGTCCGGGTCTCCTGGACAG | 1696 |
| | | TCAGTCACTATCTCCTGCACTGGAACCAGCAGTGATGTTGGTGGTTAT | |
| | | AAGTATGTCTCCTGGTACCAACAGCACCCAGGCAAAGCCCCCAAACT | |
| | | CATGATTTATGACGTCAGTAAGCGGCCCTCAGGGGTCCCTGATCGCTT | |
| | | CTCTGGCTCCAAGTCTGGCAACACGGCCTCCCTGACCATCTCTGGGCT | |
| | | CCAGGCTGAGGATGAGGGTGATTATTACTGCTGCTCATATGCAGGCA | |
| | | CCTACAGTTTGGTATTCGGCGGAGGGACCAAGGTGACCGTGACCGTC | |
| | | CTAGGTCAGCCCAAGGCTGCCCCCTCGGTCACTCTGTTCCCGCCCTCC | |
| | | TCTGAGGAGCTTCAAGCCAACAAGGCCACACTGGTGTGTCTCATAAG | |
| | | TGACTTCTACCCGGGAGCCGTGACAGTGGCCTGGAAGGCAGATAGCA | |
| | | GCCCCGTCAAGGCGGGAGTGGAGACCACCACACCCTCCAAACAAAGC | |
| | | AACAACAAGTACGCGGCCAGCAGCTATCTGAGCCTGACGCCTGAGCA | |
| | | GTGGAAGTCCCACA | |
| S144- | HC-DNA | GAGGTGCAGCTGGTGGAGTCTGGGGGAGGCCTGGTCAAGCCGGGGG | 1697 |
| 339 | | GGTCCCTGAGACTCTCCTGTGCAGCCTCTGGATTCACCTTCAGTGACT | |
| | | ATACCATGAACTGGGTCCGACAGGCTCCAGGGAAGGGACTGGAGTGG | |
| | | GTCTCATCCATTACTAGAAGTAGTACTTACATCTACTACGCAGACTCA | |
| | | GTGAAGGGCCGATTCACCATCTCCAGAGACAACGCCAAGAACTCACT | |
| | | GTATCTGCAAATGAACAGCCTGAGAGCCGAGGACACGGCTGTCTATT | |
| | | ACTGTGCGAGAGACCCCTATTACGATATTTTGACTGGTTATTGGAACT | |
| | | ACTGGGGCCAGGGAACCCTGGTCACCGTCTCCTCAGCCTCCACCAAG | |
| | | GGCCCATCGGTCTTCCCCCTGGCACCCTCCTCCAAGAGCACCTCTGGG | |
| | | GGCACAGCGGCCCTGGGCTGCCTGGTCAAGGACTACTTCCCCGAACC | |
| | | GGTGACGGTGTCGTGGAACTCAGGCGCCCTGACCAGCGGCGTGCACA | |
| | | CCTTCCCGGCTGTCCTACAGTCCTCAGGA | |
| | LC-DNA | GAAATTGTGTTGACGCAGTCTCCAGGCACCCTGTCTTTGTCTCCAGGG | 1698 |
| | | GAAAGAGCCACCCTCTCCTGCAGGGCCAGTCAGAGTCTTAGCAGCAG | |
| | | CTACTTAGCCTGGTACCAGCAGAAACCTGGCCAGTCTCCCAGGCTCCT | |
| | | CATTTATGGTGCATCCAGCAGGGCCACTGGCATCCCAGACAGGTTCA | |
| | | GTGGCAGTGGGTCTGGGACAGACTTCACTCTCACCATCAACAGACTG | |
| | | GAGCCTGAAGATTTTGCAGTATATTACTGTCAGCAGTATCGTACCTCA | |
| | | CCTCGAGGCACTTTCGGCGGAGGGACCAAGGTGGAGATCAAACGAAC | |
| | | TGTGGCTGCACCATCTGTCTTCATCTTCCCGCCATCTGATGAGCAGTT | |
| | | GAAATCTGGAACTGCCTCTGTTGTGTGCCTGCTGAATAACTTCTATCC | |
| | | CAGAGAGGCCAAAGTACAGTGGAAGGTGGATAACGCCCTCCAATCGG | |
| | | GTAACTCCCAGGAGAGTGTCACAGAGCAGGACAGCAAGGACAGCAC | |
| | | CTACAGCCTCAGCAGCACCCTGACGCTGAGCAAAGCAGACTACGAGA | |
| | | A | |
| S144- | HC-DNA | GAGGTGCAGCTGGTGGAGTCTGGGGGAGGCTTGGTACAGCCTGGGGG | 1699 |
| 359 | | GTCCCTGAGACTCTCCTGTGCAGCCTCTGGATTCACCTTTAGCAGCTA | |
| | | TGCCATGAGCTGGGTCCGCCAGGCTCCAGGGAAGGGGCTGGAGTGGG | |
| | | TCTCATCTATTAGAGGTAGTGGTGGTAGCACATACTACGCAGACTCCG | |
| | | TGAAGGGCCGGTTCACCATCTCCAGAGACAACTCCAAGTACACGTTG | |
| | | TATCTGCAAATGAACAGCCTGAGAGCCGAGGACACGGCCGTATATTA | |
| | | CTGTGCGAAAATAACTGGAGCCGTCGGGGGGGAGAACTGGTTCGACC | |
| | | CCTGGGGCCAGGGAACCCTGGTCACCGTCTCCTCAGCCTCCACCAAG | |
| | | GGCCCATCGGTCTTCCCCCTGGCGCCCTGCTCCAGGAGCACCTCTGGG | |
| | | GGCACAGCGGCCCTGGGCTGCCTGGTCAAGGACTACTTCCCCGAACC | |
| | | GGTGACGGTGTCGTGGAACTCAGGCGCCCTGACCAGCGGCGTGCACA | |
| | | CCTTCCCGGCTGTCCTACAGTCCTCAGGA | |
| | LC-DNA | GACATCCAGATGACCCAGTCTCCATCCTCCCTGTCTGCATCTGTAGGA | 1700 |
| | | GACAGAGTCACCATCACTTGCCGGGCAAGTCAGAGCATTAGCAGCTA | |
| | | TTTAAATTGGTATCAGCAGAAACCAGGGAAAGCCCCTAAGCTCCTGA | |
| | | TCTATGCTGCATCCAGTTTGCAAAGTGGGGTCCCATCAAGGTTCAGTG | |
| | | GCAGTGGATCTGGGACAGATTTCACTCTCACCATCAGCAGTCTGCAAC | |
| | | CTGAAGATTTTGCAATTTACTACTGTCAACAGACTTCCCGTACCCCGC | |
| | | TCACTTTCGGCGGAGGGACCAAGGTGGAGGTCAAACGAACTGTGGCT | |
| | | GCACCATCTGTCTTCATCTTCCCGCCATCTGATGAGCAGTTGAAATCT | |
| | | GGAACTGCCTCTGTTGTGTGCCTGCTGAATAACTTCTATCCCAGAGAG | |
| | | GCCAAAGTACAGTGGAAGGTGGATAACGCCCTCCAATCGGGTAACTC | |
| | | CCAGGAGAGTGTCACAGAGCAGGACAGCAAGGACAGCACCTACAGC | |
| | | CTCAGCAGCACCCTGACGCTGAGCAAAGCAGACTACGAGAA | |
| S144- | HC-DNA | GAGGTGCGCCTGGTGCAGTCTGGGGGAGGCTTGGTAAAGCCCGGGGG | 1701 |
| 460 | | GTCCCTGAGACTCTCCTGTGCAGCCTCTGGATTCACCTTCAGCACCGC | |
| | | CTGGGTGAGGTGGGTCCGCCAGGCTCCAGGGAAGGGGCTGGAGTGCG | |
| | | TTGGCCGAATCAAAAGTAAAAATGACGGTGACAGAGCAGAGTACGCT | |
| | | GCACCCGCGAGAGGCAGATTCATCATCTCAAGAGATGATGCAGAAAA | |
| | | CATTCTGTATTTACAAATGAACAACCTGAAAACCGAGGACACAGCCT | |
| | | TTTATTACTGTACCACGGATCAAGGAAATAGTAGTGCCTTCTACAGTG | |
| | | CTGACTATTGGGGCCAGGGAACCCTGGTCACCGTCTCCTCAGCATCCC | |
| | | CGACCAGCCCCAAGGTCTTCCCGCTGAGCCTCGACAGCACCCCCCAA | |
| | | GATGGGAACGTGGTCGTCGCATGCCTGGTCCAGGGCTTCTTCCCCCAG | |
| | | GAGCCACTCAGTGTGACCTGGAGCGAAAGCGGACAGAACGTGACCGC | |
| | | CAGAAACTTCCC | |
| | LC-DNA | GACATCCAGATGACCCAGTCTCCATCTGCCATGTCTGCATCTGTAGGA | 1702 |
| | | GACAGAGTCACCATCACTTGTCGGGCGAGTCAGGACATTAACACCTT | |
| | | TTTAACGTGGTTTCAGCAGAAACCAGGAAAAGTCCCTCAGCGCCTGA | |
| | | TCTTTGCTGCATATCGTTTGCAAAGTGGGGTCCCTTCAAGGTTCAGTG | |
| | | GCAGTGGATCTGGGACAGAATTCACTCTCACAATCAACAGCCTGCAG | |
| | | CCTGAAGATGTTGCGACTTATTATTGTCTACACCATAAAACTTATCCG | |
| | | TACACTTTTGGCCAGGGGACCAAACTGGAGATCAAACGAACTGTGGC | |
| | | TGCACCATCTGTCTTCATCTTCCCGCCATCTGATGAGCAGTTGAAATC | |
| | | TGGAACTGCCTCTGTTGTGTGCCTGCTGAATAACTTCTATCCCAGAGA | |
| | | GGCCAAAGTACAGTGGAAGGTGGATAACGCCCTCCAATCGGGTAACT | |
| | | CCCAGGAGAGTGTCACAGAGCAGGACAGCAAGGACAGCACCTACAG | |
| | | CCTCAGCAGCACCCTGACGCTGAGCAAAGCAGACTACGAGAA | |
| S144- | HC-DNA | GAGGTGCAGCTGGTGCAGTCTGGAGCAGAGGTGAAAAAGCCCGGGG | 1703 |
| 466 | | AGTCTCTGAAGATCTCCTGTAAGGGTTCTGGATACAGGTTTACCAGAT | |
| | | ACTGGATCGGCTGGGTGCGCCAGATGCCCGGGAAAGGCCTGGAGTGG | |
| | | ATGGGGATCATCTATCTTGGTGACTCTGAAACCAGATACAGTCCGTCC | |
| | | TTCCAAGGCCAGGTCACCATCTCAGCCGACAACTCCATCAGCACCGC | |
| | | CTACCTGCAGTGGAGCAGCCTGAAGGCCTCGGACACCGCCATGTATT | |
| | | ACTGTGCGAGAAGTTCCAATTGGAATTACGGTGACTACTGGGGCCAG | |
| | | GGAACCCTGGTCACCGTCTCCTCAGCTTCCACCAAGGGCCCATCGGTC | |
| | | TTCCCCCTGGCGCCCTGCTCCAGGAGCACCTCTGGGGGCACAGCGGC | |
| | | CCTGGGCTGCCTGGTCAAGGACTACTTCCCCGAACCGGTGACGGTGTC | |
| | | GTGGAACTCAGGCGCCCTGACCAGCGGCGTGCACACCTTCCCGGCTG | |
| | | TCCTACAGTCCTCAGGA | |
| | LC-DNA | GACATCCAGATGACCCAGTCTCCTTCCACCCTGTCTGCATCTGTGGGA | 1704 |
| | | GACAGAGTCACCATCACTTGCCGGGCCAGTCAGAGTATTACTAGTTG | |
| | | GTTGGCCTGGTATCAGCAGAAATCAGGGAAAGCCCCTAAACTCCTGA | |
| | | TCTATGATGCCTCCAGTTTGGAAAGTGGGGTCCCATCAAGGTTCAGCG | |
| | | GCAGTGGATCTGGGACAGAATTCACTCTCACCATCAGCAGCCTGCAG | |
| | | CCTGATGATTTTGCAACTTATTACTGCCAACAGTATAATAGTTATCCT | |
| | | TGGACGTTCGGCCAAGGGACCAAGGTGGAAATCAAACGAACTGTGGC | |
| | | TGCACCATCTGTCTTCATCTTCCCGCCATCTGATGAGCAGTTGAAATC | |
| | | TGGAACTGCCTCTGTTGTGTGCCTGCTGAATAACTTCTATCCCAGAGA | |
| | | GGCCAAAGTACAGTGGAAGGTGGATAACGCCCTCCAATCGGGTAACT | |
| | | CCCAGGAGAGTGTCACAGAGCAGGACAGCAAGGACAGCACCTACAG | |
| | | CCTCAGCAGCACCCTGACGCTGAGCAAAGCAGACTACGAGAA | |
| S144- | HC-DNA | CAGGTGCAGCTGCAGGAGTCGGGCCCAGGACTGGTGAAGCCTTCGGA | 1705 |
| 469 | | GACCCTGTCCCTCACCTGCACTGTCTCTGGTGGCTCCATCAGTAGTGA | |
| | | CTACTGGAGCTGGATCCGGCAGCCCCCAGGGAAGGGACTGGAGTGGA | |
| | | TTGGATATATGTATTACAGTGGGAGCACCAACTACAACCCCTCCCTCA | |
| | | AGAGTCGAGTCACCATATCAGTAGACACGTCCAAGAACCAGTTCTCC | |
| | | CTGAAGCTGAGCTCTGTGACCGCTGCGGACACGGCCGTGTATTACTGT | |
| | | GCGAGATGGGATAGGGGAAGCAGGCCTCACTACTACTACTATGGTAT | |
| | | GGACGTCTGGGGCCAAGGGACCACGGTCACCGTCTCCTCAGCCTCCA | |
| | | CCAAGGGCCCATCGGTCTTCCCCCTGGCACCCTCCTCCAAGAGCACCT | |
| | | CTGGGGGCACAGCGGCCCTGGGCTGCCTGGTCAAGGACTACTTCCCC | |
| | | GAACCGGTGACGGTGTCGTGGAACTCAGGCGCCCTGACCAGCGGCGT | |
| | | GCACACCTTCCCGGCTGTCCTACAGTCCTCAGGA | |
| | LC-DNA | GATATTGTGATGACTCAGTCTCCACTCTCCCTGCCCGTCACCCCTGGA | 1706 |
| | | GAGCCGGCCTCCATCTCCTGCAGGTCTAGTCAGAGCCTCCTGCATAGT | |
| | | AATGGATACAACTATTTGGATTGGTACCTGCAGAAGCCAGGGCAGTC | |
| | | TCCACAGCTCCTGATCTATTTGGGTTCTAATCGGGCCTCCGGGGTCCC | |
| | | TGACAGGTTCAGTGGCAGTGCATCAGGCACAGATTTTACACTGAAAA | |
| | | TCAGCAGAGTGGAGGCTGAGGATGTTGGGGTTTATTACTGCATGCAA | |
| | | GCTCTACAAGCTTTCACTTTCGGCCCTGGGACCAAAGTGGATATCAAA | |
| | | CGAACTGTGGCTGCACCATCTGTCTTCATCTTCCCGCCATCTGATGAG | |
| | | CAGTTGAAATCTGGAACTGCCTCTGTTGTGTGCCTGCTGAATAACTTC | |
| | | TATCCCAGAGAGGCCAAAGTACAGTGGAAGGTGGATAACGCCCTCCA | |
| | | ATCGGGTAACTCCCAGGAGAGTGTCACAGAGCAGGACAGCAAGGAC | |
| | | AGCACCTACAGCCTCAGCAGCACCCTGACGCTGAGCAAAGCAGACTA | |
| | | CGAGA | |
| S144- | HC-DNA | GAGGTGCAGCTGGTGCAGTCTGGAGCAGAGGTGAAAAAGCCCGGGG | 1707 |
| 509 | | AGTCTCTGAAGATCTCCTGTAAGGGTTCTGCATACACCTTTACCACCT | |
| | | ACTGGATCGGCTGGGTGCGCCAGATGCCCGGGAAAGGCCTGGAGTGG | |
| | | ATGGGGATCATCTATCCTGGTGACTCTGATACCAGATACAGCCCGTCC | |
| | | TTCCAAGGCCAGGTCACCATCTCAGCCGACAAGTCCATCAGCACCGC | |
| | | CTACCTGCAGTGGAGCAGCCTGAAGGCCTCGGACACCGCCATGTATT | |
| | | ACTGTGCGAGATTATTATTGGTGGCTGGTCCCTTTGACTACTGGGGCC | |
| | | AGGGAACCCTGGTCACCGTCTCCTCAGCCTCCACCAAGGGCCCATCG | |
| | | GTCTTCCCCCTGGCACCCTCCTCCAAGAGCACCTCTGGGGGCACAGCG | |
| | | GCCCTGGGCTGCCTGGTCAAGGACTACTTCCCCGAACCGGTGACGGT | |
| | | GTCGTGGAACTCAGGCGCCCTGACCAGCGGCGTGCACACCTTCCCGG | |
| | | CTGTCCTACAGTCCTCAGGACTCTACTCCCTCAGCAGCGTGGTGACCG | |
| | | TGCCCTCCAGCAGCTTGGGCACCCAGACCTACATCTGCAACGTGAATC | |
| | | ACAAGCCCAGCAACACCAAGGTGGACA | |
| | LC-DNA | GACATCCAGATGACCCAGTCTCCTTCCACCCTGTCTGCATCTGTAGGA | 1708 |
| | | GACAGAGTCACCATCACTTGCCGGGCCAGTCAGAGTATTAGTAGCTG | |
| | | GTTGGCCTGGTATCAGCAGAAACCAGGGAAAGCCCCTAACCTCCTGA | |
| | | TCTATGATGCCTCCAGTTTGGAAAGTGGGGTCCCATCAAGGTTCAGCG | |
| | | GCAGTGGATCTGGGACAGAATTCACTCTCACCATCAGCAGCCTGCAG | |
| | | CCTGATGATTTTGCAACTTATTACTGCCAACAGTATAATAGTTATCCG | |
| | | TGGACGTTCGGCCAAGGGACCAAGGTGGAAATCAAACGAACTGTGGC | |
| | | TGCACCATCTGTCTTCATCTTCCCGCCATCTGATGAGCAGTTGAAATC | |
| | | TGGAACTGCCTCTGTTGTGTGCCTGCTGAATAACTTCTATCCCAGAGA | |
| | | GGCCAAAGTACAGTGGAAGGTGGATAACGC | |
| S144- | HC-DNA | CAGGTGCAGCTGCTGCAGTCTGGGGCTGAAGTGAAGAAGCCTGGGGC | 1709 |
| 516 | | CTCAGTGAAGGTCTCCTGCAAGGCTTCTGGATACACCTTCACCGGCTA | |
| | | CTATATGCACTGGGTGCGACAGGCCCCTGGACAAGGGCTTGAGTGGA | |
| | | TGGGACGGATCAACCCTAACAGTGGTGGCACAAATTATGCACAGAAG | |
| | | TTTCAGGGCAGGGTCACCATGACCAGGGACACGTCCATCAGCACAGC | |
| | | CTACATGGAGCTGAGCAGGCTGACATCTGACGACACGGCCGTGTATT | |
| | | ACTGTGCGACCAAAACTGGAATTGATCGCTACTACTACTACTACATGG | |
| | | ACGTCTGGGGCAAAGGGACCACGGTCACCGTCTCCTCAGCCTCCACC | |
| | | AAGGGCCCATCGGTCTTCCCCCTGGCACCCTCCTCCAAGAGCACCTCT | |
| | | GGGGGCACAGCGGCCCTGGGCTGCCTGGTCAAGGACTACTTCCCCGA | |
| | | ACCGGTGACGGTGTCGTGGAACTCAGGCGCCCTGACCAGCGGCGTGC | |
| | | ACACCTTCCCGGCTGTCCTACAGTCCTCAGGA | |
| | LC-DNA | CAGTCTGTGCTGACGCAGCCGCCCTCAGTGTCTGAGGCCCCAGGGCA | 1710 |
| | | GAGGGTCACCATCTCCTGCACTGGGAGCAGCTCCAACATCGGGGCAG | |
| | | GTTATGATGTACACTGGTACCAGCAGCTTCCAGGAACAGCCCCCAAA | |
| | | CTGCTCATCTATGGTAACATTAATCGGCCCTCAGGGGTCCCTGACCGA | |
| | | TTCTCTGGCTCCAAGTCTGGCACCTCAGCCTCCCTGGCCATCACTGGG | |
| | | CTCCAGGCTGAGGATGAGGCTGATTATTACTGCCAGTCCTATGACAAC | |
| | | AGCCTGAATGGTTCGGTGTTCGGCGGAGGGACCAAACTGACCGTCCT | |
| | | ACGTCAGCCCAAGGCTGCCCCCTCGGTCACTCTGTTCCCACCCTCCTC | |
| | | TGAGGAGCTTCAAGCCAACAAGGCCACACTGGTGTGTCTCATAAGTG | |
| | | ACTTCTACCCGGGAGCCGTGACAGTGGCCTGGAAGGCAGATAGCAGC | |
| | | CCCGTCAAGGCGGGAGTGGAGACCACCACACCCTCCAAACAAAGCAA | |
| | | CAACAAGTACGCGGCCAGCAGCTA | |
| S144- | HC-DNA | CAGGTGCAGCTGCAGGAGTCGGGCCCAGGACTGGTGAAGCCTTCGGA | 1711 |
| 568 | | GACCCTGTCCCTCACCTGCAGTGTCTCTGGTGGCTCCATCAGTGATTA | |
| | | CTACTGGAGCTGGATCCGGCAGCCCCCTGGGAAGGGACTGGAGTGGA | |
| | | TTGGATATATCTATAACAGTGGGAGTACCAACTACAACCCCTCCCTCA | |
| | | AGAGTCGAGTCACCATATCAGCAGACCCGTCCAAGAACCAGTTCTCC | |
| | | CTGAAGTTGAGCTCTGTGACCGCCGCAGACACGGCCGTATATTACTGT | |
| | | GCGAGACCTCACGGCGGTGACTACGCTTTTGATATTTGGGGCCAAGG | |
| | | GACAATGGTCACCGTCTCTTCAGCATCCCCGACCAGCCCCAAGGTCTT | |
| | | CCCGCTGAGCCTCGACAGCACCCCCCAAGATGGGAACGTGGTCGTCG | |
| | | CATGCCTGGTCCAGGGCTTCTTCCCCCAGGAGCCACTCAGTGTGACCT | |
| | | GGAGCGAAAGCGGACAGAACGTGACCGCCAGAAACTTCCC | |
| | LC-DNA | GAAATTGTGTTGACGCAGTCTCCAGGCACCCTGTCTTTGTCTCCAGGG | 1712 |
| | | GAAAGAGCCACCCTCTCATGTAGGGCCAGTCAGAGTGTTAGCAGCAA | |
| | | CTTCCTAGCCTGGTACCAGCAGAAACCTGGCCAGCCTCCCAGGCTCCT | |
| | | CATCTATGGTGCATCCGTCAGGGCCACTGGCATCCCAGACAGGTTCA | |
| | | GTGGCAGTGGGTCTGGGACAGACTTCACTCTCACCATCACCAGACTG | |
| | | GAGCCTGAAGATTTTGCAGTATATTACTGTCAGCAGTATGGTAGCTTA | |
| | | CCTCGGACGTTCGGCCAAGGGACCAAGGTGGAAATCAAACGAACTGT | |
| | | GGCTGCACCATCTGTCTTCATCTTCCCGCCATCTGATGAGCAGTTGAA | |
| | | ATCTGGAACTGCCTCTGTTGTGTGCCTGCTGAATAACTTCTATCCCAG | |
| | | AGAGGCCAAAGTACAGTGGAAGGTGGATAACGCCCTCCAATCGGGTA | |
| | | ACTCCCAGGAGAGTGTCACAGAGCAGGACAGCAAGGACAGCACCTA | |
| | | CAGCCTCAGCAGCACCCTGACGCTGAGCAAAGCAGACTACGAGA | |
| S144- | HC-DNA | CAGGTCCAGCTGGTGCAATCTGGGGCTGAGGTGATGAAGCCTGGGTC | 1713 |
| 576 | | CTCGGTGAAGGTCTCCTGCAAGGCTTCTGGAGGCACCTTCAGCAGCTA | |
| | | TAGTATCACCTGGGTGCGACAGGCCCCTGGACAAGGGCTTGAGTGGA | |
| | | TGGGAAGGATCATCCCTATCCTTGGTATAGCAAACTACGCACAGAAG | |
| | | TTCCAGGGCAGAGTCACGATTACCGCGGACAAATCCACGAGCACAGC | |
| | | CTACATGGAGCTGAGCAGCCTGAGATCTGAGGACACGGCCGTGTATT | |
| | | ACTGTGCGAGAGGGTATAGTGGGAGCCCCTCGAATTTAGACGGTATG | |
| | | GACGTCTGGGGCCAAGGGACCACGGTCACCGTCTCCTCAGCCTCCAC | |
| | | CAAGGGCCCATCGGTCTTCCCCCTGGCACCCTCCTCCAAGAGCACCTC | |
| | | TGGGGGCACAGCGGCCCTGGGCTGCCTGGTCAAGGACTACTTCCCCG | |
| | | AACCGGTGACGGTGTCGTGGAACTCAGGCGCCCTGACCAGCGGCGTG | |
| | | CACACCTTCCCGGCTGTCCTACAGTCCTCAGGA | |
| | LC-DNA | CATCCAGATGACCCAGTCTCCTTCCACCCTGTCTGCATCTGTAGGAGA | 1714 |
| | | CAGAGTCACCATCACTTGCCGGGCCAGTCAGAGTATTAGTAGCTGGTT | |
| | | GGCCTGGTATCAGCAGAAACCAGGGAAAGCCCCTAAGCTCCTGATCT | |
| | | ATGATGCCTCCAGTTTGCAAAGTGGGGTCCCATCAAGGTTCAGCGGC | |
| | | AGTGGATCTGGGACAGAATTCACTCTCACCATCAGCAGCCTGCAGCC | |
| | | TGATGATTTTGCAACTTATTACTGCCAACAGTATAATAGTTATTCTCC | |
| | | GATCACCTTCGGCCAAGGGACACGACTCGAGATTAAACGAACTGTGG | |
| | | CTGCACCATCTGTCTTCATCTTCCCGCCATCTGATGAGCAGTTGAAAT | |
| | | CTGGAACTGCCTCTGTTGTGTGCCTGCTGAATAACTTCTATCCCAGAG | |
| | | AGGCCAAAGTACAGTGGAAGGTGGATAACGCCCTCCAATCGGGTAAC | |
| | | TCCCAGGAGAGTGTCACAGAGCAGGACAGCAAGGACAGCACCTACA | |
| | | GCCTCAGCAGCACCCTGACGCTGAGCAAAGCAGACTACGAGAA | |
| S144- | HC-DNA | CAGCTGCAGCTGCAGGAGTCGGGCCCAGGACTGGTGAAGCCTTCGGA | 1715 |
| 588 | | GACCCTGTCCCTCACCTGCACTGTCTCTGGTGGCTCCATCAGCAGTAG | |
| | | TAGTTACTACTGGGGCTGGATCCGCCAGCCCCCAGGGAAGGGGCTGG | |
| | | AGTGGATTGGGAGTATCTATTATAGTGGGAGCACCTACTACAACCCG | |
| | | TCCCTCAAGAGTCGATTCACCATATCCGTAGACACGTCCAAGAACCA | |
| | | GTTCTCCCTGAAGCTGAGCTCTGTGACCGCCGCAGACACGGCTGTGTA | |
| | | TTACTGTGCGGCCTATCAGAGGAAACTAGGATATTGTCGTGGTAATA | |
| | | GCTGCTTTTCCTGCTTCGACCCCTGGGGCCAGGGAACCCTGGTCACCG | |
| | | TCTCCTCAGCCTCCACCAAGGGCCCATCGGTCTTCCCCCTGGCACCCT | |
| | | CCTCCAAGAGCACCTCTGGGGGCACAGCGGCCCTGGGCTGCCTGGTC | |
| | | AAGGACTACTTCCCCGAACCGGTGACGGTGTCGTGGAACTCAGGCGC | |
| | | CCTGACCAGCGGCGTGCACACCTTCCCGGCTGTCCTACAGTCCTCAGG | |
| | | A | |
| | LC-DNA | TCCTATGAGCTGACTCAGCCACCCTCAGTGTCCGTGTCCCCAGGACAG | 1716 |
| | | ACAGCCAGCATCACCTGCTCTGGAGATAAATTGGGGGATAAATATGC | |
| | | TTGCTGGTATCAGCAAAAGCCAGGCCAGTCCCCTGTGCTGGTCATCTA | |
| | | TCAAGATACCAAGCGGCCCTCAGGGATCCCTGAGCGATTCTCTGGCTC | |
| | | CAACTCTGGGAACACAGCCACTCTGACCATCAGCGGGACCCAGGCTA | |
| | | TGGATGAGGCTGACTATTACTGTCAGGCGTGGGACAGTAGCACTGTG | |
| | | TTATTCGGCGGAGGGACCAAGCTGACCGTCCTAGGTCAGCCCAAGGC | |
| | | TGCCCCCTCGGTCACTCTGTTCCCGCCCTCCTCTGAGGAGCTTCAAGC | |
| | | CAACAAGGCCACACTGGTGTGTCTCATAAGTGACTTCTACCCGGGAG | |
| | | CCGTGACAGTGGCCTGGAAGGCAGATAGCAGCCCCGTCAAGGCGGGA | |
| | | GTGGAGACCACCACACCCTCCAAACAAAGCAACAACAAGTACGCGGC | |
| | | CAGCAGCTATCTGAGCCTGACGCCTGAGCAGTGGAAGTCCCACA | |
| S144- | HC-DNA | GAGGTGCACCTGGTGCAGTCTGGAGCAGAGGTGAAACAGCCCGGGG | 1717 |
| 628 | | AGTCTCTGAAGATCTCCTGTAAGGGTTCTGGATACAACTTTGCCACCT | |
| | | ACTGGATCGCCTGGGTGCGCCAGATGCCCGGGAAAGGCCTGGAGTGG | |
| | | ATGGGGATCATCTATCCTGGTGACTCTGATACCAGATACAGCCCGTCC | |
| | | TTCCAAGGCCAGGTCATCATCTCAGCCGACAAGTCCATCGGCACCGC | |
| | | CTTCCTGCAGTGGAGCAGCCTGAAGGCCTCGGACACCGCCATGTATT | |
| | | ACTGTGCGAGGCGGGGGTATAGTAGCTCTAACTATCGCGTTGACGAA | |
| | | TACTATTACTACGGTATGGACGTCTGGGGCCAAGGGACCACGGTCAC | |
| | | CGTCTCCTCAGCATCCCCGACCAGCCCCAAGGTCTTCCCGCTGAGCCT | |
| | | CTGCAGCACCCAGCCAGATGGGAACGTGGTCATCGCCTGCCTGGTCC | |
| | | AGGGCTTCTTCCCCCAGGAGCCACTCAGTGTGACCTGGAGCGAAAGC | |
| | | GGACAGGGCGTGACCGCCAGAAACTTCCCC | |
| | LC-DNA | CAGTCTGTGCTGACGCAGCCGCCCTCAATGTCTGGGGCCCCAGGGCA | 1718 |
| | | GAGGGTCACCATCTCCTGCACTGGGAGCAGCTCCAACATCGGGGCAG | |
| | | GTTATGATGTACACTGGTACCAGCAGCTTCCAGGAGCAGCCCCCAAA | |
| | | CTCCTCATCTATGGTGACACCAGTCGGCCCTCAGGGGTCCCTGACCGA | |
| | | TTCTCTGGCTCCAAGTCTGACACCTCAGCCTCCCTGGCCATCACTGGG | |
| | | CTCCAGGCTGAGGATGAGGCTGATTATTACTGCCAGTCCTTTGACAGA | |
| | | AGTCTGAGTGGTCTCGTGATTTTCGGCGGAGGGACCAGGCTGACCGT | |
| | | CCTCGGTCAGCCCAAGGCTGCCCCCTCGGTCACTCTGTTCCCACCCTC | |
| | | CTCTGAGGAGCTTCAAGCCAACAAGGCCACACTGGTGTGTCTCATAA | |
| | | GTGACTTCTACCCGGGAGCCGTGACAGTGGCCTGGAAGGCAGATAGC | |
| | | AGCCCCGTCAAGGCGGGAGTGGAGACCACCACACCCTCCAAACAAAG | |
| | | CAACAACAAGTACGCGGCCAGCAGCTAAGATCGGAAGAGC | |
| S144- | HC-DNA | CAGGTGCAGCTGGTGCAGTCTGGGGCTGAGGTGAAGAAGCCTGGGGC | 1719 |
| 740 | | CTCAGTGAAGGTCTCCTGCAAGGCTTCTGGATACACCTTCACCGGCTA | |
| | | CTATATGCACTGGGTGCGACAGGCCCCTGGACAAGGGCTTGAGTGGA | |
| | | TGGGACGGATCAACCCTAACAGTGGTGACACAAACTATGCACAGAAG | |
| | | TTTCAGGGCAGGGTCACCATGACCAGGGACACGTCCATCAGCACAGC | |
| | | CTACATGGAGCTGAGCAGGCTGAGATCTGACGACACGGCCGTGTATT | |
| | | ACTGTGCGAGATTGGGTAAAGGAATGGCAGCAGCCCGTACTGTCTTT | |
| | | GACTCCTGGGGCCAGGGAACCCTGGTCACCGTCTCCTCAGCCTCCACC | |
| | | AAGGGCCCATCGGTCTTCCCCCTGGCACCCTCCTCCAAGAGCACCTCT | |
| | | GGGGGCACAGCGGCCCTGGGCTGCCTGGTCAAGGACTACTTCCCCGA | |
| | | ACCGGTGACGGTGTCGTGGAACTCAGGCGCCCTGACCAGCGGCGTGC | |
| | | ACACCTTCCCGGCTGTCCTACAGTCCTCAGGA | |
| | LC-DNA | GAAGTTGTGTTGACGCAGTCTCCAGGCACCCTGTCTTTGTCTCCAGGG | 1720 |
| | | GAAAGAGCCACCCTCTCCTGCAGGGCCAGTCAGAGTGTTAGCAGCAG | |
| | | CTACTTAGCCTGGTACCAGCAGAAACCTGGCCAGGCTCCCAGGCTCG | |
| | | TCATCTATGGTGCATCCAGCAGGGCCACTGGCATCCCAGACAGGTTC | |
| | | AGTGGCAGTGGGTCTGGGACAGACTTCACTCTCACCATCAGCAGACT | |
| | | GGAGCCTGAAGATTTTGCAGTGTATTACTGTCAGCAGTTTGGTAGCTC | |
| | | TCCCACCTTCGGCCGAGGGACACGACTGGAGATTAAACGAACTGTGG | |
| | | CTGCACCATCTGTCTTCATCTTCCCGCCATCTGATGAGCAGTTGAAAT | |
| | | CTGGAACTGCCTCTGTTGTGTGCCTGCTGAATAACTTCTATCCCAGAG | |
| | | AGGCCAAAGTACAGTGGAAGGTGGATAACGCCCTCCAATCGGGTAAC | |
| | | TCCCAGGAGAGTGTCACAGAGCAGGACAGCAAGGACAGCACCTACA | |
| | | GCCTCAGCAGCACCCTGACGCTGAGCAAAGCAGACTACGAGAA | |
| S144- | HC-DNA | CAGGTGCACCTGGTGCAGTCTGGGGCTGAGGTGAAGAAGCCTGGGGC | 1721 |
| 741 | | CTCAGTGAAGGTCTCCTGCAAGGCTTCTGGATACACCTTCACCGGCTA | |
| | | CTATATGAACTGGGTGCGACAGGCCCCTGGACAAGGGCTTGAGTGGA | |
| | | TGGGACGGATCAACCCTAACAGTGGTGGCACAAACTATGCACAGAAG | |
| | | TTTCAGGGCAGGGTCACCATGACCAGGGACACGTCCATCAGCACAGC | |
| | | CTACATGGAACTGAGCAGGCTGAGATCTGACGACGCGGCCGTGTATT | |
| | | ACTGTGCGAGAGCTGAGAGGTATAGCAGCAGCTGGTACAATCTTTAC | |
| | | TACTGGGGCCAGGGAACCCTGGTCACCGTCTCCTCAGCCTCCACCAA | |
| | | GGGCCCATCGGTCTTCCCCCTGGCACCCTCCTCCAAGAGCACCTCTGG | |
| | | GGGCACAGCGGCCCTGGGCTGCCTGGTCAAGGACTACTTCCCCGAAC | |
| | | CGGTGACGGTGTCGTGGAACTCAGGCGCCCTGACCAGCGGCGTGCAC | |
| | | ACCTTCCCGGCTGTCCTACAGTCCTCAGGA | |
| | LC-DNA | CAGTCTGTGCTGACTCAGCCACCCTCAGCGTCTGGGACCCCCGGGCA | 1722 |
| | | GAGGGTCACCATCTCTTGTTCTGGAAGCAGCTCCAACATCGGAAGTA | |
| | | ATACTGTAAACTGGTACCAGCAGCTCCCAGGAACGGCCCCCAAGCTC | |
| | | CTCATCTATAGTAATAATCAGCGGCCCTCAGGGGTCCCTGACCGATTC | |
| | | TCTGGCTCCAAGTCTGGCACCTCAGCCTCCCTGGCCATCAGTGGGCTC | |
| | | CAGTCTGAGGATGAGGCTGATTATTACTGTGCAGCATGGGATGACAG | |
| | | CCTGAATGGTGTGGTATTCGGCGGAGGGACCAAGCTGACCGTCCTAG | |
| | | GTCAGCCCAAGGCTGCCCCCTCGGTCACTCTGTTCCCGCCCTCCTCTG | |
| | | AGGAGCTTCAAGCCAACAAGGCCACACTGGTGTGTCTCATAAGTGAC | |
| | | TTCTACCCGGGAGCCGTGACAGTGGCCTGGAAGGCAGATAGCAGCCC | |
| | | CGTCAAGGCGGGAGTGGAGACCACCACACCCTCCAAACAAAGCAAC | |
| | | AACAAGTACGCGGCCAGCAGCTATCTGAGCCTGACGCCTGAGCAGTG | |
| | | GAAGTCCCACA | |
| S144- | HC-DNA | GAGGTGCAGCTGGTGCAGTCTGGAGCAGAGGTGAAAAAGCCCGGGG | 1723 |
| 803 | | AGTCTCTGAAGATCTCCTGTAAGGGTTCTAGATACAGCTTTACCAGAT | |
| | | ACTGGATCGCCTGGGTGCGCCAGATGCCCGGGAAAGGCCTGGAGTGG | |
| | | ATGGGGATCATCTATCCTGGTGACTCTGATACCAGATACAGCCCGTCC | |
| | | TTCCAAGGCCCGGTCACCATCTCAGCCGACAAGTCCATCAGCACCGC | |
| | | CTACCTGCAGTGGAGCAGCCTGAAGGCCTCGGACACCGCCATATATT | |
| | | ACTGTGCGAGACTCCCGAACAGTAACTACGTTGACTACTGGGGCCAG | |
| | | GGAACCCTGGTCACCGTCTCCTCAGCCTCCACCAAGGGCCCATCGGTC | |
| | | TTCCCCCTGGCACCCTCCTCCAAGAGCACCTCTGGGGGCACAGCGGC | |
| | | CCTGGGCTGCCTGGTCAAGGACTACTTCCCCGAACCGGTGACGGTGTC | |
| | | GTGGAACTCAGGCGCCCTGACCAGCGGCGTGCACACCTTCCCGGCTG | |
| | | TCCTACAGTCCTCAGGACTCTACTCCCTCAGCAGCGTGGTGACCGTGC | |
| | | CCTCCAGCAGCTTGGGCACCCAGACCTACATCTGCAACGTGAATCAC | |
| | | AAGCCCAGCAACACCAAGGTGGACAA | |
| | LC-DNA | GACATCCAGATGACCCAGTCTCCTTCCACCCTGTCTGCATCTGTAGGA | 1724 |
| | | GACAGAGTCACCATCACTTGCCGGGCCAGTCAGAGTATTAGTAGTTG | |
| | | GTTGGCCTGGTATCAGCAGAAACCAGGGAAAGCCCCTAAGCTCCTGA | |
| | | TCTATGATGCCTCCAGTTTGGAAAGTGGGGTCCCATCAAGGTTCAGCG | |
| | | GCAGTGGATCTGGGACAGAATTCACTCTCACCATCAGCAGCCTGCAG | |
| | | CCTGATGATTTTGCAACTTATTACTGCCAACAGTATAATATTTACCCG | |
| | | TACACTTTTGGCCAGGGGACCAAGCTGGACATCAAACGAACTGTGGC | |
| | | TGCACCATCTGTCTTCATCTTCCCGCCATCTGATGAGCAGTTGAAATC | |
| | | TGGAACTGCCTCTGTTGTGTGCCTGCTGAATAACTTCTATCCCAGAGA | |
| | | GGCCAAAGTACAGTGGAAGGTGGATAACGCCCTCCAATCGGGTAACT | |
| | | CCCAGGAGAGTGTCACAGAGCAGGACAGCAAGGACAGCACCTACAG | |
| | | CCTCAGCAGCACCCTGACGCTGAGCAAAGCAGACTACGAGAA | |
| S144- | HC-DNA | CAGGTGCAGCTGGTGGAGTCTGGGGGAGGCGTGGTCCAGCCTGGGGG | 1725 |
| 843 | | GTCCGTAAGACTCTCCTGTGCAGCGTCTGGATTCGACTTCACTAATAA | |
| | | TGGCATGTATTGGGTCCGCCAGGCTCCAGGCAAGGGGCTGGAGTGGG | |
| | | TGGCATTTATACGGTATGATGGAAATAAACAAGACTATGCAGACTCC | |
| | | GTGAAGGGCCGATTCACCATCTCCAGAGACAATTCCAAAAACACTCT | |
| | | GTATCTGCAAATGAGCAGCCTTAGACCTGAGGACACGGCTGTATATT | |
| | | ACTGTGCGAAAGGTGTTTATACTGAAAATTACGGCTGGGGCCAGGGA | |
| | | ACCCTGGTCACCGTCTCCTCAGGGACCACGGTCACCGTCTCCTCAGCC | |
| | | TCCACCAAGGGCCCATCGGTCTTCCCCCTGGCGCCCTGCTCCAGGAGC | |
| | | ACCTCCGAGAGCACAGCGGCCCTGGGCTGCCTGGTCAAGGACTACTT | |
| | | CCCCGAACCGGTGACGGTGTCGTGGAACTCAGGCGCTCTGACCAGCG | |
| | | GCGTGCACACCTTCCCAGCTGTCCTACAGTCCTCAGGACTCTACTCCC | |
| | | TCAGCAGCGTGGTGACCGTGCCCTCCAGCAACTTCGGCACCCAGACC | |
| | | TACACCTGCAACGTAGATCACAAGCCCAGCAACACCAAGGTGGACAA | |
| | LC-DNA | GAAATTGTGTTGACGCAGTCTCCAGGCACCCTGTCTTTGTCTCCAGGG | 1726 |
| | | GAAAGAGCCACCCTCTCCTGCAGGGCCAGTCAGACTGTTACCAGCAG | |
| | | GTACTTAGCCTGGTATCAGCAGAAGCCTGGCCAGGCTCCCAGGCTCCT | |
| | | CATCTATGGTGCATCCACCAGGGCCACTGGCATCCCAGACAGGTTCA | |
| | | GTGGCAGTGGGTCTGGGACAGACTTCACTCTCACCATCAGCAGACTG | |
| | | GAGCCTGAAGATTTTGCAGTGTATTACTGTCAGCAGTATGGTAATTCA | |
| | | CCTCCGTACACTTTTGGCCAGGGGACCAAGCTGGAGATCAAACGAAC | |
| | | TGTGGCTGCACCATCTGTCTTCATCTTCCCGCCATCTGATGAGCAGTT | |
| | | GAAATCTGGAACTGCCTCTGTTGTGTGCCTGCTGAATAACTTCTATCC | |
| | | CAGAGAGGCCAAAGTACAGTGGAAGGTGGATAACGCCCTCCAATCGG | |
| | | GTAACTCCCAGGAGAGTGTCACAGAGCAGGACAGCAAGGACAGCAC | |
| | | CTACAGCCTCAGCAGCACCCTGACGCTGAGCAAAGCAGACTACGAGA | |
| | | A | |
| S144- | HC-DNA | CAGGTGCAGCTGGTGGAGTCTGGGGGAGGCGTGGTCCAGCCTGGGAG | 1727 |
| 877 | | GTCCCTGAGACTCTCCTGTGCAGCCTCTGGATTCACCTTCAGTACCTA | |
| | | TGGCATGCACTGGGTCCGCCAGGCTCCAGGCAAGGGGCTGGAGTGGG | |
| | | TGGCAGTTATATCATATGATGGAAGTAATAAATATTATGCAGACTCCG | |
| | | TGAAGGGCCGATTCACCATCTCCAGAGACAATTCCAAGAACACGCTG | |
| | | TATCTGCAAATGAACAGCCTGAGAGCTGAGGACACGGCTGTGTATTA | |
| | | CTGTGCGAAACAGCAAGGCACCTATTGCAGTGGTGGTAACTGCTACT | |
| | | CGGGATATTTTGACTACTGGGGCCAGGGAACCCTGGTCACCGTCTCCT | |
| | | CAGCCTCCACCAAGGGCCCATCGGTCTTCCCCCTGGCACCCTCCTCCA | |
| | | AGAGCACCTCTGGGGGCACAGCGGCCCTGGGCTGCCTGGTCAAGGAC | |
| | | TACTTCCCCGAACCGGTGACGGTGTCGTGGAACTCAGGCGCCCTGAC | |
| | | CAGCGGCGTGCACACCTTCCCGGCTGTCCTACAGTCCTCAGGACTCTA | |
| | | CTCCCTCAGCAGCGTGGTGACCGTGCCCTCCAGCAGCTTGGGCACCCA | |
| | | GACCTACATCTGCA | |
| | LC-DNA | GACATCCAGATGACCCAGTCTCCATCCTCCCTGTCTGCATCTGTAGGA | 1728 |
| | | GACAGAGTCACCATCACTTGCCAGGCGAGTCAGGACATTAGCAACTA | |
| | | TTTAAATTGGTATCAGCAGAAACCAGGGAAAGCCCCTAAGCTCCTGA | |
| | | TCTACGATGCATCGAATTTGGAAACAGGGGTCCCATCAAGGTTCAGT | |
| | | GGAAGTGGATCTGGGACAGATTTTAGTTTTAGTATCAGCAGCCTGCA | |
| | | GCCTGAAGATATTGCAACATATTACTGTCAACAGTATGATAATGTCCC | |
| | | TCTTACTTTCGGCGGAGGGACCAAGGTGGAGATCAAACGAACTGTGG | |
| | | CTGCACCATCTGTCTTCATCTTCCCGCCATCTGATGAGCAGTTGAAAT | |
| | | CTGGAACTGCCTCTGTTGTGTGCCTGCTGAATAACTTCTATCCCAGAG | |
| | | AGGCCAAAGTACAGTGGAAGGTGGATAACGCCCTCCAATCGGGTAAC | |
| | | TCCCAGGAGAGTGTCACAGAGCAGGACAGCAAGGACAGCACCTACA | |
| | | GCCTCAGCAGCACCCTGACGCTGAGCAAAGCAGACTACGAGAA | |
| S144- | HC-DNA | CAGGTTCAGCTGGTGCAGTCTGGAGCTGAGGTGAAGAAGCCTGGGGC | 1729 |
| 952 | | CTCAGTGAAGGTCTCCTGCACGGCTTCTGGTTACACCGTTACCAGTTA | |
| | | TGGTATCAGCTGGGTGCGACAGGCCCCTGGACAAGGGCTTGAGTGGA | |
| | | TGGGATGGATCAGCACTTACAATGGTAACACAAACTATGCACAGAAG | |
| | | CTCCAGGGCAGAGTCACCATGACCACAGACACATCCACGAGCACAGC | |
| | | CTACATGGAGCTGAGGAGCCTGAGATCTGACGACACGGCCGTGTATT | |
| | | ACTGTGCGAGAGAATACAGCTATGGTTACCGACTGGCCTACTTTGACT | |
| | | ACTGGGGCCAGGGAACCCTGGTCACCGTCTCCTCAGGGAGTGCATCC | |
| | | GCCCCAACCCTTTTCCCCCTCGTCTCCTGTGAGAATTCCCCGTCGGAT | |
| | | ACGAGCAGCGTGGCCGTTGGCTGCCTCGCACAGGACTTCCTTCCCGAC | |
| | | TCCATCACTTTCTCCTGGAAATACAAGAACAACTCTGACATCAGCAGC | |
| | | ACCCGGGGCTTCCCATCAGTCCTGAGAGGGGGCAAGTACGCAGCCAC | |
| | | CTCACAGGTGCTGCTGCCTTCCAAGGACGTCATG | |
| | LC-DNA | GACATCGTGATGACCCAGTCTCCAGACTCCCTGGCTGTGTCTCTGGGC | 1730 |
| | | GAGAGGGCCACCATCAACTGCAAGTCCAGCCAGAGTGTTTTAAACAG | |
| | | CTCCAACAATAAGAACTACTTAGCTTGGTACCAGCAGAAACCAGGAC | |
| | | AGCCTCCTAAGCTGCTCATTTACTGGGCATCTACCCGGGAATCCGGGG | |
| | | TCCCTGACCGATTCAGTGGCAGCGGGTCTGGGACAGATTTCACTCTCA | |
| | | CCATCAGCAGCCTGCAGGCTGAAGATGTGGCAGTTTATTACTGTCAGC | |
| | | AGTATTATAGTACTCCTCAGACGTTCGGCCAAGGGACCAAGGTGGAA | |
| | | ATCAAACGAACTGTGGCTGCACCATCTGTCTTCATCTTCCCGCCATCT | |
| | | GATGAGCAGTTGAAATCTGGAACTGCCTCTGTTGTGTGCCTGCTGAAT | |
| | | AACTTCTATCCCAGAGAGGCCAAAGTACAGTGGAAGGTGGATAACGC | |
| | | CCTCCAATCGGGTAACTCCCAGGAGAGTGTCACAGAGCAGGACAGCA | |
| | | AGGACAGCACCTACAGCCTCAGCAGCACCCTGACGCTGAGCAAAGCA | |
| | | GACTACGAGA | |
| S144- | HC-DNA | GAGGTGCAGCTGGTGGAGTCTGGGGGAGGCTTGGTCCAGCCTGGGGG | 1731 |
| 971 | | GTCCCTGAGAATCTCTTGTTCAGCCTCTGGATTCACCTTCAGTAGATA | |
| | | TGCTATGCACTGGGTCCGCCAGGCTCCAGGGAAGGGACTGGAATATG | |
| | | TTTCAGCTATTAGGAGTAATGGGGGTAGCACATACTACGCAGACTCC | |
| | | GTGAGGGGCAGATTCACCATCTCCAGAGACAATTCCAGGAACACGCT | |
| | | GTATCTTCAAATGAGCAGTCTGAGAGCTGAGGACACGGCTGTGTATT | |
| | | ACTGTGTGATAATAAACAATTTAGCAGCAGCTGGTACCCGTTTTGACT | |
| | | ACTGGGGCCAGGGAACCCTGGTCACCGTCTCCTCAGCCTCCACCAAG | |
| | | GGCCCATCGGTCTTCCCCCTGGCACCCTCCTCCAAGAGCACCTCTGGG | |
| | | GGCACAGCGGCCCTGGGCTGCCTGGTCAAGGACTACTTCCCCGAACC | |
| | | GGTGACGGTGTCGTGGAACTCAGGCGCCCTGACCAGCGGCGTGCACA | |
| | | CCTTCCCGGCTGTCCTACAGTCCTCAGGA | |
| | LC-DNA | GACATCGTGATGACCCAGTCTCCAGACTCCCTGGCTGTGTCTCTGGGC | 1732 |
| | | GAGAGGGCCACCATCAACTGCAAGTCCAGCCAGAGTGTTTTATACAG | |
| | | CTCCAACAATAAGAACTTCTTAACTTGGTACCAGCAGAAACCAGGAC | |
| | | AGCCTCCTAAGCTGCTCATTTACTGGGCATCTACCCGGGAATCCGGGG | |
| | | TCCCTGACCGATTCAGTGGCAGCGGGTCTGGGACAGATTTCACTCTCA | |
| | | CCATCAGCAGCCTGCAGGCTGAAGATGTGGCAGTTTATTACTGTCAGC | |
| | | AATATTATACTACTCCGTGGACGTTCGGCCAAGGGACCAAGGTGGAA | |
| | | ATCAAACGAACTGTGGCTGCACCATCTGTCTTCATCTTCCCGCCATCT | |
| | | GATGAGCAGTTGAAATCTGGAACTGCCTCTGTTGTGTGCCTGCTGAAT | |
| | | AACTTCTATCCCAGAGAGGCCAAAGTACAGTGGAAGGTGGATAACGC | |
| | | CCTCCAATCGGGTAACTCCCAGGAGAGTGTCACAGAGCAGGACAGCA | |
| | | AGGACAGCACCTACAGCCTCAGCAGCACCCTGACGCTGAGCAAAGCA | |
| | | GACTACGAGAA | |
| S144- | HC-DNA | CAGGTGCAGCTACAGCAGTGGGGCGCAGGGCTGTTGAAGCCTTCGGA | 1733 |
| 1036 | | GACCCTGTCCCTCACCTGCGCTGTCTATGGTGGGTCCTTCAGTGGTTA | |
| | | CTTCTGGAGCTGGATCCGCCAGCCCCCAGGGAAGGGGCTGGAGTGGA | |
| | | TTGGGGAAATCAATCATAGTGGAAGCACCAACTACAACCCGTCCCTC | |
| | | AAGAGTCGAGTCACCATATCAGTAGACACGTCCAAGAACCAGTTCTC | |
| | | CCTGAAGCTGAGCTCTGTGACCGCCGCGGACACGGCTGTGTATTACTG | |
| | | TGCGAGAGCGCCCTATTACGATTTCTTGCGGGAAGGAAACTGGTTCG | |
| | | ACCCCTGGGGCCAGGGAACCCTGGTCACCGTCTCCTCAGCCTCCACC | |
| | | AAGGGCCCATCGGTCTTCCCCCTGGCACCCTCCTCCAAGAGCACCTCT | |
| | | GGGGGCACAGCGGCCCTGGGCTGCCTGGTCAAGGACTACTTCCCCGA | |
| | | ACCGGTGACGGTGTCGTGGAACTCAGGCGCCCTGACCAGCGGCGTGC | |
| | | ACACCTTCCCGGCTGTCCTACAGTCCTCAGGACTCTACTCCCTCAGCA | |
| | | GCGTGGTGACCGTGCCCTCCAGCAGCTTGGGCACCCAGACCTACATCT | |
| | | GCAACGTGAATCACAAGCCCAGC | |
| | LC-DNA | GACATCGTGATGACCCAGTCTCCAGACTCCCTGGCTGTGTCTCTGGGC | 1734 |
| | | GAGAGGGCCACCATCAACTGCAACTCCAGCCAGAGTGTTTTATACAG | |
| | | CTCCATCAATAAGAACTACTTAGCTTGGTACCAGCAGAAACCAGCAC | |
| | | AGCCTCCTAAGGTGCTCATTTACTGGGCATCTACCCGGGAATCCGGGG | |
| | | TCCCTGACCGATTCAGTGGCAGCGGGTCTGGGACAGATTTCACTCTCA | |
| | | CCATCAGCAGCCTGCAGGCTGAAGATGTGGCAGTTTATTACTGTCAGC | |
| | | AATATTATAGGACTCCCTGGACGTTCGGCCAAGGGACCAAGGTGGAA | |
| | | ATCAAACGAACTGTGGCTGCACCATCTGTCTTCATCTTCCCGCCATCT | |
| | | GATGAGCAGTTGAAATCTGGAACTGCCTCTGTTGTGTGCCTGCTGAAT | |
| | | AACTTCTATCCCAGAGAGGCCAAAGTACAGTGGAAGGTGGATAACGC | |
| | | CCTCCAATCGGGTAACTCCCAGGAGAGTGTCACAGAGCAGGACAGCA | |
| | | AGGACAGCACCTACAGCCTCAGCAGCACCCTGACGCTGAGCAAAGCA | |
| | | GACTACGAGAA | |
| S144- | HC-DNA | CAGGTCCAGCTGGTGCAATCTGGGGCTGAGGTGAAGAAGCCTGGGTC | 1735 |
| 1079 | | CTCGGTGAAGGTCTCCTGCAAGGCTTCTGGAGACACCTTCGGCAGCTA | |
| | | TAGTATCACCTGGGTGCGACAGGCCCCTGGACAAGGACTTGAGTGGA | |
| | | TGGGAAGGATCATCCCTGTCCTTGGTATAGCAAACTACGCACAGAAG | |
| | | TTCCAGGGCAGAGTCACGATTACCGCGGACAAATCCACGAGCACAGC | |
| | | CTACATGGAGCTGAGCAGCCTGAGATCTGAGGACACGGCCGTGTATT | |
| | | ACTGTGCGGGAGGGGGTTGTAGTGGTGGTAACTGCTACTCGTGGTAC | |
| | | AACTGGTTCGACCCCTGGGGCCAGGGATCCCTGGTCACCGTCTCCTCA | |
| | | GCCTCCACCAAGGGCCCATCGGTCTTCCCCCTGGCACCCTCCTCCAAG | |
| | | AGCACCTCTGGGGGCACAGCGGCCCTGGGCTGCCTGGTCAAGGACTA | |
| | | CTTCCCCGAACCGGTGACGGTGTCGTGGAACTCAGGCGCCCTGACCA | |
| | | GCGGCGTGCACACCTTCCCGGCTGTCCTACAGTCCTCAGGA | |
| | LC-DNA | GAAATTGTGTTGACGCAGTCTCCAGGCACCCTGTCTTTGTCTCCAGGG | 1736 |
| | | GAAAGAGCCACCCTCTCCTGCAGGGCCAGTCAGAGTGTTAGCAGCAA | |
| | | CTACTTAGCCTGGTACCAGCAGAAACCTGGCCAGGCTCCCAGGCTCCT | |
| | | CATCTATGGTGCATCCAGCAGGGCCACTGGCATCCCAGAGAGGTTCA | |
| | | GTGGCAGTGGGTCTGGGACAGACTTCACTCTCACCATCAGCAGACTG | |
| | | GAGCCTGAAGATTTTGCAGTGTATTACTGTCAGCAGTATGGTAGGTCA | |
| | | CCGTACACTTTTGGCCAGGGGACCAAGCTGGAGATCAAACGAACTGT | |
| | | GGCTGCACCATCTGTCTTCATCTTCCCGCCATCTGATGAGCAGTTGAA | |
| | | ATCTGGAACTGCCTCTGTTGTGTGCCTGCTGAATAACTTCTATCCCAG | |
| | | AGAGGCCAAAGTACAGTGGAAGGTGGATAACGCCCTCCAATCGGGTA | |
| | | ACTCCCAGGAGAGTGTCACAGAGCAGGACAGCAAGGACAGCACTTAC | |
| | | AGCCTCAGCAGCACCCTGACGCTGAGCAAAGCAGACTACGAGAA | |
| S144- | HC-DNA | CAGGTGCAGCTGCAGGAGTCGGGCCCAGGACTGGTGAAGCCTTCGGA | 1737 |
| 1299 | | GACCCTGTCCCTCACCTGCACTGTCTCTGGTGGCTCCATCAGTAGTTA | |
| | | CTACTGGAGCTGGATCCGGCAGCCCCCAGGGAAGGGACTGGAGTGGA | |
| | | TTGGGTATATCAATTACAGGGGGATCACCAACTACAACCCCTCCCTCA | |
| | | AGAGTCGAGTCACCATATCAGTAGACATGTCCAAGAACCAGTTCTCC | |
| | | CTGAAGCTGAGCTCTGTGACCGCCGCAGACACGGCCGTGTATTCCTGT | |
| | | GCGAGACTAGCAGTGGCTAGTCGAGGGACCGTTGACTACTGGGGCCA | |
| | | GGGAACCCTGGTCACCGTCTCCTCAGCCTCCACCAAGGGCCCATCGGT | |
| | | CTTCCCCCTGGCACCCTCCTCCAAGAGCACCTCTGGGGGCACAGCGG | |
| | | CCCTGGGCTGCCTGGTCAAGGACTACTTCCCCGAACCGGTGACGGTGT | |
| | | CGTGGAACTCAGGCGCTCTGACCAGCGGCGTGCACACCTTCCCAGCT | |
| | | GTCCTACAGTCCTCAGGACTCTACTCCCTCAGCAGCGTGGTGACCGTG | |
| | | CCCTCCAGCAACTTCGGCACCCAGACCTACACCTGCAACGTAGATCA | |
| | | CAAGCCCAGCAACACCAAGGTGGAC | |
| | LC-DNA | CAGTCTGTGCTGACTCAGCCACCCTCAGCGTCTGGGACCCCCGGGCA | 1738 |
| | | GAGGGTCACCATCTCTTGTTCTGGAAGCAGCTCCAACATCGGAAGTA | |
| | | ATTATGTATACTGGTACCAGCAGCTCCCAGGAACGGCCCCCAAACTC | |
| | | CTCATCTATAGGAATAATCAGCGGCCCTCAGGGGTCCCTGACCGATTC | |
| | | TCTGGCTCCAAGTCTGGCACCTCAGCCTCCCTGGCCATCAGTGGGCTC | |
| | | CGGTCCGAGGATGAGGCTGATTATTACTGTGCAGCATGGGATGACAG | |
| | | CCTGAGTGTTAATGTGGTATTCGGCGGAGGGACCAAGCTGACCGTCC | |
| | | TAGGTCAGCCCAAGGCTGCCCCCTCGGTCACTCTGTTCCCGCCCTCCT | |
| | | CTGAGGAGCTTCAAGCCAACAAGGCCACACTGGTGTGTCTCATAAGT | |
| | | GACTTCTACCCGGGAGCCGTGACAGTGGCCTGGAAGGCAGATAGCAG | |
| | | CCCCGTCAAGGCGGGAGTGGAGACCACCAAACCCTCCAAACAGAGCA | |
| | | ACAACAAGTACGCGGCCAGCAGCTACCTGAGCCTGACGCCTGAGCAG | |
| | | TGGAAGTCCCACA | |
| S144- | HC-DNA | CAGGTGCAGCTGGTGCAGTCTGGGACTGAGGTGAAGAAGCCTGGGGC | 1739 |
| 1339 | | CTCAGTGAAGGTCTCCTGCAAGGCTTCTGGATACACCTTCACCGACTA | |
| | | CTATATGCACTGGGTGCGACAGGCCCCTGGACAAGGGCTTGAGTGGA | |
| | | TGGGACGGATCAACCCTACCAGTGGTGGCACAAACTATCCACAGAAG | |
| | | TTTCAGGGCAGTGTCACCATGACCAGGGACACGTCCCTCAGCACAGT | |
| | | CTACATGGAACTGAGCGGGCTGAGATCTGACGACACGGCCGTCTATT | |
| | | ATTGTGCGAGAGAGAGGGTTACTCTGATTCAGGGAAAGAACCACTAC | |
| | | TACATGGACGTCTGGGGCACAGGGACCACGGTCACCGTCTCCTCAGC | |
| | | CTCCACCAAGGGCCCATCGGTCTTCCCCCTGGCACCCTCCTCCAAGAG | |
| | | CACCTCTGGGGGCACAGCGGCCCTGGGCTGCCTGGTCAAGGACTACT | |
| | | TCCCCGAACCGGTGACGGTGTCGTGGAACTCAGGCGCCCTGACCAGC | |
| | | GGCGTGCACACCTTCCCGGCTGTCCTACAGTCCTCAGGA | |
| | LC-DNA | CAGTCTGCCCTGACTCAGCCTGCCTCCGTGTCTGGGTCTCCTGGACAG | 1740 |
| | | TCGATCACCATCTCCTGCACTGGAACCAACAGTGACGTTGGTGGTTAT | |
| | | AACTATGTCTCCTGGTACCAACAACACCCAGGCAAAGCCCCCAGACT | |
| | | CATGATTTATGATGTCAGTAATCGGCCCTCAGGGGTTTCTAATCGCTT | |
| | | CTCTGGCTCCAAGTCTGGCAACACGGCCTCCCTGACCATCTCTGGGCT | |
| | | CCAGGCTGAGGACGAGGCTGATTATTACTGCAGCTCATATACAAGCA | |
| | | GCAGCACTCTCGTGGTTTTCGGCGGAGGGACCAAGCTGACCGTCCTA | |
| | | GGTCAGCCCAAGGCTGCCCCCTCGGTCACTCTGTTCCCGCCCTCCTCT | |
| | | GAGGAGCTTCAAGCCAACAAGGCCACACTGGTGTGTCTCATAAGTGA | |
| | | CTTCTACCCGGGAGCCGTGACAGTGGCCTGGAAGGCAGATAGCAGCC | |
| | | CCGTCAAGGCGGGAGTGGAGACCACCACACCCTCCAAACAAAGCAAC | |
| | | AACAAGTACGCGGCCAGCAGCTATCTGAGCCTGACGCCTGAGCAGTG | |
| | | GAAGTCCCACA | |
| S144- | HC-DNA | CAGGTCCAGCTTGTGCAGTCTGGGGCTGAGGTGAAGAAGCCTGGGGC | 1741 |
| 1406 | | CTCAGTGAAGGTTTCCTGCAAGGCTTCTGGATATACCTTCACTACCTA | |
| | | TGCTATGCATTGGGTGCGCCAGGCCCCCGGACAAAGGCTTGAGTGGA | |
| | | TGGGATGGATCAACGCTGGCAATGGTAACACAAAATATTCACAGAAC | |
| | | TTCCAGGGCAGAGTCACCATTACCAGGGACACATCCGCGAGCACAGC | |
| | | CTACATGGAGCTGAGCAGCCTGAGATCTGAAGACACGGCTGTGTATT | |
| | | ACTGTGCGAGTCTCGTGGGTGGGGATAGCAGCAGCTGGTATGACTAC | |
| | | ATGGACGTCTGGGGCAAAGGGACCACGGTCACCGTCTCCTCAGCCTC | |
| | | CACCAAGGGCCCATCGGTCTTCCCCCTGGCGCCCTGCTCCAGGAGCA | |
| | | CCTCCGAGAGCACAGCGGCCCTGGGCTGCCTGGTCAAGGACTACTTC | |
| | | CCCGAACCGGTGACGGTGTCGTGGAACTCAGGCGCTCTGACCAGCGG | |
| | | CGTGCACACCTTCCCAGCTGTCCTACAGTCCTCAGGACTCTACTCCCT | |
| | | CAGCAGCGTGGTGACCGTGCCCTCCAGCAACTTCGG | |
| | LC-DNA | GACATCCAGATGACCCAGTCTCCTTCCACCCTGTCTGCATCTGTAGGA | 1742 |
| | | GACAGAGTCACCATCACTTGCCGGGCCAGTCAGAGTATTAGTAGCTG | |
| | | GTTGGCCTGGTATCAGCAGAAACCAGGGAAAGCCCCTAAGCTCCTGA | |
| | | TCTATGATGCCTCCAGTTTGGAAAGTGGGGTCCCATCAAGGTTCAGCG | |
| | | GCAGTGGATCTGGGACAGAATTCACTCTCACCATCAGCAGCCTGCAG | |
| | | CCTGATGATTTTGCAACTTATTACTGCCAACAGTATAATAGTTATCCG | |
| | | TGGACGTTCGGCCAAGGGACCAAGGTGGAAATCAAACGAACTGTGGC | |
| | | TGCACCATCTGTCTTCATCTTCCCGCCATCTGATGAGCAGTTGAAATC | |
| | | TGGAACTGCCTCTGTTGTGTGCCTGCTGAATAACTTCTATCCCAGAGA | |
| | | GGCCAAAGTACAGTGGAAGGTGGATAACGCCCTCCAATCGGGTAACT | |
| | | CCCAGGAGAGTGTCACAGAGCAGGACAGCAAGGACAGCACCTACAG | |
| | | CCTCAGCAGCACCCTGACGCTGAGCAAAGCAGACTACGAGAA | |
| S144- | HC-DNA | CAGGTCCAGCTGGTGCAATCTGGGGCTGAGGTGAAGAAGCCTGGGTC | 1743 |
| 1407 | | CTCGGTGAAGGTCTCCTGCAAGGCTTCTGGAGGCACCTTCAGCAGCTA | |
| | | TACTATCAGCTGGGTGCGACAGGCCCCTGGACAAGGCCTTGAGTGGA | |
| | | TGGGAAGGATCATCCCTGTCCGTGATATAGCAAACTACGCACAGAAG | |
| | | TTCCAGGGCAGAGTCACGATTACCGCGGACAAATCCACGAGGACAGC | |
| | | CTACATGGAGGTGAGCAGCCTGAGATCTGAGGACACGGCCGTGTATT | |
| | | ACTGTGCGGCAACGGAGCTCCGCTCGGATGGTCTTGACATCTGGGGC | |
| | | CAAGGGACAATGGTCACCGTCTCTTCAGCCTCCACCAAGGGCCCATC | |
| | | GGTCTTCCCCCTGGCACCCTCCTCCAAGAGCACCTCTGGGGGCACAGC | |
| | | GGCCCTGGGCTGCCTGGTCAAGGACTACTTCCCCGAACCGGTGACGG | |
| | | TGTCGTGGAACTCAGGCGCCCTGACCAGCGGCGTGCACACCTTCCCG | |
| | | GCTGTCCTACAGTCCTCAGGA | |
| | LC-DNA | GACATCCAGATGACCCAGTCTCCTTCCACCCTGTCTGCATCTGTAGGA | 1744 |
| | | GACAGAGTCACCATCACTTGCCGGGCCAGTCAGAGTATTAGTAGCTG | |
| | | GTTGGCCTGGTATCAGCAGAAACCAGGGAAAGCCCCTAAGCTCCTGA | |
| | | TCTATGATGCCTCCAGTTTGGAAAGTGGGGTCCCATCAAGGTTCAGCG | |
| | | GCAGTGGATCTGGGACAGAATTCACTCTCACCGTCAGCAGCCTGCAG | |
| | | CCTGATGATTTTGCAACTTATTACTGCCAACAGTATAATAATTATTCT | |
| | | CCCATCACTTTTGGCCAGGGGACCAAGCTGGAGATCAAACGAACTGT | |
| | | GGCTGCACCATCTGTCTTCATCTTCCCGCCATCTGATGAGCAGTTGAA | |
| | | ATCTGGAACTGCCTCTGTTGTGTGCCTGCTGAATAACTTCTATCCCAG | |
| | | AGAGGCCAAAGTACAGTGGAAGGTGGATAACGCCCTCCAATCGGGTA | |
| | | ACTCCCAGGAGAGTGTCACAGAGCAGGACAGCAAGGACAGCACCTA | |
| | | CAGCCTCAGCAGCACCCTGACGCTGAGCAAAGCAGACTACGAGAA | |
| S144- | HC-DNA | CAGGTTCAGCTGGTGCAGTCTGGAGCTGAGGTGAAGAAGCCTGGGGC | 1745 |
| 1569 | | CTCAGTGAAGGTCTCCTGCAAGGCTTCTGGTTACACCTTTTCCAACTA | |
| | | CGGTATCAGCTGGGTGCGACAGGCCCCTGGACAAGGGCTTGAGTGGA | |
| | | TGGGATGGATCAGCGCTTACAATGGTAACACTAAGTATCCACAAAAG | |
| | | CTCCAGGGCAGAGTCACCATGAGCACAGACACATCCACGAGCACAGC | |
| | | CTACATGGAGCTGAGGAGCCTGAGATCTGACGACACGGCCGTGTATT | |
| | | ACTGTGCGAGAGAGACGCGGTACGGTATGGACGTCTGGGGCCAAGGG | |
| | | ACCACGGTCACCGTCTCCTCAGCCTCCACCAAGGGCCCATCGGTCTTC | |
| | | CCCCTGGCACCCTCCTCCAAGAGCACCTCTGGGGGCACAGCGGCCCT | |
| | | GGGCTGCCTGGTCAAGGACTACTTCCCCGAACCGGTGACGGTGTCGT | |
| | | GGAACTCAGGCGCCCTGACCAGCGGCGTGCACACCTTCCCGGCTGTC | |
| | | CTACAGTCCTCAGGA | |
| | LC-DNA | CAGCCTGTGCTGACTCAGCCACCTTCTGCATCAGCCTCCCTGGGAGCC | 1746 |
| | | TCGGTCACACTCACCTGCACCCTGAGCAGCGGCTACAGTAATTATAA | |
| | | AGTGGACTGGTACCAGCAGAGACCAGGGAAGGGCCCCCAGTTTGTGA | |
| | | TGCGAGTGGGCACTGGTGGGATTGTGGGATCCAAGGGGGATGGCATC | |
| | | CCTGATCGCTTCTCAGTCTTGGGCTCAGGCCTGAATCGGTACCTGACC | |
| | | ATCAAGAACATCCAGGAAGAGGATGAGAGTGACTACCACTGTGGGGC | |
| | | AGACCATGGCAGTGGGAGCAACTTCGTTCGGGTGTTCGGCGGAGGGA | |
| | | CCAAGCTGACCGTCCTAGGTCAGCCCAAGGCTGCCCCCTCGGTCACTC | |
| | | TGTTCCCACCCTCCTCTGAGGAGCTTCAAGCCAACAAGGCCACACTGG | |
| | | TGTGTCTCATAAGTGACTTCTACCCGGGAGCCGTGACAGTGGCCTGGA | |
| | | AGGCAGATAGCAGCCCCGTCAAGGCGGGAGTGGAGACCACCACACC | |
| | | CTCCAAACAAAGCAACAACAAGTACGCGGCCAGCAGCTACCTGAGCC | |
| | | TGACGCCTGAGCAGTGGAAGTCCCAC | |
| S144- | HC-DNA | GAGGTGCAGCTGGTGCAGTCTGGAGCAGAGGTGAAAAAGCCCGGGG | 1747 |
| 1641 | | AGTCTCTGAAGATCTCCTGTAAGGGTTCTGGATACACCTTTACCAGCT | |
| | | ACTGGATCGGCTGGGTGCGCCAGATGCCCGGGAAAGGCCTGGAGTGG | |
| | | ATGGGGATCATCTATCTTGGTGACTCTGATACGAGATACAGCCCGTCC | |
| | | TTCCAAGGCCAGGTCACCATCTCAGCCGACAAGTCCATCAGCACCGC | |
| | | CTACCTGCAGTGGAACAGCCTGAAGGCCTCGGACACCGCCATGTATT | |
| | | ACTGTGCGAGACAGGTTACCGGAACTACGAGCTGGTTCGACCCCTGG | |
| | | GGCCAGGGAACCCTGGTCACCGTCTCCTCAGCCTCCACCAAGGGCCC | |
| | | ATCGGTCTTCCCCCTGGCACCCTCCTCCAAGAGCACCTCTGGGGGCAC | |
| | | AGCGGCCCTGGGCTGCCTGGTCAAGGACTACTTCCCCGAACCGGTGA | |
| | | CGGTGTCGTGGAACTCAGGCGCCCTGACCAGCGGCGTGCACACCTTC | |
| | | CCGGCTGTCCTACAGTCCTCAGGA | |
| | LC-DNA | GACATCCAGATGACCCAGTCTCCTTCCACCCTGTCTGCATCTGTAGGA | 1748 |
| | | GAGAGAGTCACCATCACTTGCCGGGCCAGTCAGAGTATTAGTAGGTG | |
| | | GTTGGCCTGGTATCAGCAGAAACCAGGGAAAGCCCCTAAACTCCTTA | |
| | | TCTATGATGCCTCCAGTTTGGAAAGTGGGGTCCCATCAAGGTTCAGCG | |
| | | GCAGTGGATCTGGGACAGAATTCACTCTCACCATCAGCAGCCTGCAG | |
| | | CCTGATGATTTTGCAACTTATCACTGCCACCAGTATAGTACTTATTCG | |
| | | CTCACTTTCGGCGGAGGGACCAAGGTGGACATCAAACGAACTGTGGC | |
| | | TGCACCATCTGTCTTCATCTTCCCGCCATCTGATGAGCAGTTGAAATC | |
| | | TGGAACTGCCTCTGTTGTGTGCCTGCTGAATAACTTCTATCCCAGAGA | |
| | | GGCCAAAGTACAGTGGAAGGTGGATAACGCCCTCCAATCGGGTAACT | |
| | | CCCAGGAGAGTGTCACAGAGCAGGACAGCAAGGACAGCACCTACAG | |
| | | CCTCAGCAGCACCCTGACGCTGAGCAAAGCAGACTACGAGAA | |
| S144- | HC-DNA | GAGGTGCAGCTGGTGGAGTCTGGGGGAGACGTGGTCCAGCCTGGGGG | 1749 |
| 1827 | | GTCCCTGAGACTCTCCTGTGCAGCCTCTGGAATTACCTTTAGTAACTA | |
| | | TTGGATGACCTGGGTCCGCCAGGCTCCAGGGAAAGGGCTGGAGTGGG | |
| | | TGGCCACCATAAAGAAGGATGGAGGGGAGCAGTACTATGTGGACTCT | |
| | | GTGAAGGGCCGATTCACCATCTCCAGAGACAACGCCAGGAATTCACT | |
| | | GTATCTACAAATAAACAGCCTGAGGGCCGAGGATACGGCTGTCTATT | |
| | | ACTGTGCGAGGGGTGGATCTAGCAGCAGCTACTACTGGATCTACTGG | |
| | | GGCCAGGGAACCCTGGTCACCGTCTCCTCAGGGAGTGCATCCGCCCC | |
| | | AACCCTTTTCCCCCTCGTCTCCTGTGAGAATTCCCCGTCGGATACGAG | |
| | | CAGCGTG | |
| | LC-DNA | GAAATTGTGTTGACGCAGTCTCCAGGCACCCTGTCTTTGTCTCCAGGG | 1750 |
| | | GAAAGAGCCACCCTCTCCTGCAGGGCCAGTCAGAGTATTAGCAACAG | |
| | | CTACTTAGTCTGGTACCAGCAGAAACCTGGCCAGGCTCCCAGGCTCCT | |
| | | CATCTATGGTGCATCCACCAGGGCCACTGGCATCCCAGACAGGTTCA | |
| | | GTGGCAGTGGGTCTGGGACAGACTTCACTCTCACCATCAGCAGACTG | |
| | | GAGCCTGAAGATTTTGCAGTGTATTACTGTCAGCAGTATGGTAGCTCA | |
| | | CCGTGGACGTTCGGCCAAGGGACCACGGTGGAAATCAAACGAACTGT | |
| | | GGCTGCACCATCTGTCTTCATCTTCCCGCCATCTGATGAGCAGTTGAA | |
| | | ATCTGGAACTGCCTCTGTTGTGTGCCTGCTGAATAACTTCTATCCCAG | |
| | | AGAGGCCAAAGTACAGTGGAAGGTGGATAACGCCCTCCAATCGGGTA | |
| | | ACTCCCAGGAGAGTGTCACAGAGCAGGACAGCAAGGACAGCACCTA | |
| | | CAGCCTCAGCAGCACCCTGACGCTGAGCAAAGCAGACTACGAGAA | |
| S144- | HC-DNA | GAGGTGCAGCTGGTGGAGTCTGGGGGAGGCCTGGTCAAGCCTGGGGG | 1751 |
| 1848 | | GTCCCTGAGACTCTCCTGTGCAGCCTCTGGATTCACCTTCAGTAGCTA | |
| | | TAGCATGAACTGGGTCCGCCAGGCTCCAGGGAAGGGGCTGGAGTGGG | |
| | | TCTCGTCCATTAGTAGTAGTAGTAGTTACATATACTACGCAGACTCAG | |
| | | TGAAGGGCCGATTCACCATCTCCAGAGACAACGCCAAGAATTCACTG | |
| | | TATCTGCAACTGAACAGCCTGAGAGCCGAGGACACGGCTGTGTACTA | |
| | | CTGTGCGAGAGATCGGGACCAGTTGATATTCTCGGCCGCTTTTGATAT | |
| | | CTGGGGCCAAGGGACAATGGTCACCGTCTCTTCAGCCTCCACCAAGG | |
| | | GCCCATCGGTCTTCCCCCTGGCACCCTCCTCCAAGAGCACCTCTGGGG | |
| | | GCACAGCGGCCCTGGGCTGCCTGGTCAAGGACTACTTCCCCGAACCG | |
| | | GTGACGGTGTCGTGGAACTCAGGCGCCCTGACCAGCGGCGTGCACAC | |
| | | CTTCCCGGCTGTCCTACAGTCCTCAGGA | |
| | LC-DNA | CAGTCTGTGCTGACTCAGCCACCCTCAGCGTCTGGGACCCCCGGGCA | 1752 |
| | | GAGGGTCACCATCTCTTGTTCTGGAAGCAGCTCCAACATCGAACATA | |
| | | ATTATGTATTCTGGTACCAGCAACTCCCAGGAACGGCCCCCAAACTCC | |
| | | TCATCTATAGTAATAATCACCGGCCCTCAGGGGTCCCTGACCGATTCT | |
| | | CTGGCTCCAAGTCTGGCACCTCAGCCTCCCTGGCCATCAGTGGGCTCC | |
| | | GGTCCGAGGATGAGGCTGATTATTACTGTGCAGCATGGGATGCCAGC | |
| | | CTGAGTGGTCCTGTGGTATTCGCCGGAGGGACCAAGCTGACCGTCCT | |
| | | AGGTCAGCCCAAGGCTGCCCCCTCGGTCACTCTGTTCCCGCCCTCCTC | |
| | | TGAGGAGCTTCAAGCCAACAAGGCCACACTGGTGTGTCTCATAAGTG | |
| | | ACTTCTACCCGGGAGCCGTGACAGTGGCCTGGAAGGCAGATAGCAGC | |
| | | CCCGTCAAGGCGGGAGTGGAGACCACCACACCCTCCAAACAAAGCAA | |
| | | CAACAAGTACGCGGCCAGCAGCTA | |
| S144- | HC-DNA | GAGGTGCAGCTGGTGGAGTCTGGGGGAGGCTTGGTACAGCCTGGGGG | 1753 |
| 1850 | | GTCCCTGAGACTCTCCTGTGCAGCCTCTGGATTCACCTTTAGCAGCTA | |
| | | TGCCATGAGTTGGGTCCGCCAGGCTCCAGGGAAGGGGCTGGAGTGGG | |
| | | TCTCAGCTATTAGTGGTAGTGGTGGTAGCACATACTACGCAGACTCCG | |
| | | TGAAGGGCCGGTTCACCATCTCCAGAGCCAATTCCAAGAACACGCTG | |
| | | TATCTGCAAATGAACAGCCTGAGAGCCGAGGACACGGCCGTATATTA | |
| | | CTGTGCGAAAGGCCCGCGCTTTAGTCGCGACTACTTTGACTACTGGGG | |
| | | CCAGGGAACCCTGGTCACCGTCTCCTCAGCCTCCACCAAGGGCCCAT | |
| | | CGGTCTTCCCCCTGGCACCCTCCTCCAAGAGCACCTCTGGGGGCACAG | |
| | | CGGCCCTGGGCTGCCTGGTCAAGGACTACTTCCCCGAACCGGTGACG | |
| | | GTGTCGTGGAACTCAGGCGCCCTGACCAGCGGCGTGCACACCTTCCC | |
| | | GGCTGTCCTACAGTCCTCAGGA | |
| | LC-DNA | GACATCCAGATGACCCAGTCTCCTTCCACCCTGTCTGCATCTGTAGGA | 1754 |
| | | GACAGAGTCACCATCACTTGCCGGGCCAGTCAGAGTATTACTAGCTG | |
| | | GTTGGCCTGGTATCAGCAGAAACCAGGGAAAGCCCCTAAGCTCCTGA | |
| | | TCTATGATGCCTCCAATTTGGAAAGTGGGGTCCCATCAAGGTTCAGCG | |
| | | GCAGTGGATCTGGGACAGAATTCACTCTCACCATCAGCAGCCTGCAG | |
| | | CCTGATGATTTTGCAACTTATTACTGCCAACAGTATAATAATTATCTG | |
| | | GGGACGTTCGGCCAAGGGACCAAGGTGGAAATCAAACGAACTGTGG | |
| | | CTGCACCATCTGTCTTCATCTTCCCGCCATCTGATGAGCAGTTGAAAT | |
| | | CTGGAACTGCCTCTGTTGTGTGCCTGCTGAATAACTTCTATCCCAGAG | |
| | | AGGCCAAAGTACAGTGGAAGGTGGATAACGCCCTCCAATCGGGTAAC | |
| | | TCCCAGGAGAGTGTCACAGAGCAGGACAGCAAGGACAGCACCTACA | |
| | | GCCTCAGCAGCACCCTGACGCTGAGCAAAGCAGACTACGAGAA | |
| S144- | HC-DNA | CAGGTCCAGCTGGTGCAATCTGGGGCTGAGGTGAAGAAGCCTGGGTC | 1755 |
| 2234 | | CTCGGTGAAGGTCTCCTGCAAGGCTTCTGGAGGCACCTTCAGCAGAT | |
| | | ATACTATCAGCTGGGTGCGACAGGCCCCTGGACAAGGGCTTGAGTGG | |
| | | ATGGGAAGGATCATCCCTATACTTGGTACAGCAAACTACGCACAGAA | |
| | | TTTCCAGGGCAGAGTCACGATTACCGCGGACAAATCCACGAGCACAG | |
| | | CCTACATGGAGCTGAGTAGCCTGAGATCTGAGGACACGGCCGTGTAT | |
| | | TACTGTGCGAGACACGGATACAGCTATGGTCCCTTTGACTACTGGGGC | |
| | | CAGGGAACCCTGGTCACCGTCTCCTCAGCCTCCACCAAGGGCCCATC | |
| | | GGTCTTCCCCCTGGCACCCTCCTCCAAGAGCACCTCTGGGGGCACAGC | |
| | | GGCCCTGGGCTGCCTGGTCAAGGACTACTTCCCCGAACCGGTGACGG | |
| | | TGTCGTGGAACTCAGGCGCCCTGACCAGCGGCGTGCACACCTTCCCG | |
| | | GCTGTCCTACAGTCCTCAGGAG | |
| | LC-DNA | GACATCGTGATGACCCAGTCTCCAGACTCCCTGACTGTGTCTCTGGGC | 1756 |
| | | GAGAGGGCCACCATCAACTGCAAGTCCAGCCAGAGTGTTTTATACAG | |
| | | CTCCAACAATAAGAACTACTTAGCTTGGTACCAGCAGAAACCAGGAC | |
| | | AGCCTCCTAAGCTGCTCATTTACTGGGCATCTACCCGGGAATCCGGGG | |
| | | TCCCTGACCGATTCAGTGGCAGCGGCTCTGGGACAGATTTCACTCTCA | |
| | | CCGTCAGCAGCCTGCAGGCTGAAGATGTGGCAGTTTATTACTGTCAGC | |
| | | AATATTATAGTACTCCTGGAACGTTCGGCCAAGGGACCAAGGTGGAA | |
| | | ATCAAACGAACTGTGGCTGCACCATCTGTCTTCATCTTCCCGCCATCT | |
| | | GATGAGCAGTTGAAATCTGGAACTGCCTCTGTTGTGTGCCTGCTGAAT | |
| | | AACTTCTATCCCAGAGAGGCCAAAGTACAGTGGAAGGTGGATAACGC | |
| | | CCTCCAATCGGGTAACTCCCAGGAGAGTGTCACAGAGCAGGACAGCA | |
| | | AGGACAGCACCTACAGCCTCAGCAGCACCCTGACGCTGAGCAAAGCA | |
| | | GACTACGAGAA | |
| S564- | HC-DNA | CAGGTGCGGCTGCAGGAGTCGGGCCCAGGACTGGTGAAGCCTTCACA | 1757 |
| 105 | | GACCCTGTCCCTCACCTGCACTGTCTCTGGTGGCTCCATCAGCAGTGG | |
| | | TAGTTACTACTGGAGCTGGATCCGGCAGCCCGCCGGGAAGGGACTGG | |
| | | AGTGGATTGGGCGTTTCCATACCAGTGGGAGCACCAACTACAATCCC | |
| | | TCCCTCAAGAGTCGAGTCACCATATCAGTAGACACGTCCAAGAACCA | |
| | | GTTCTCCCTGAAGCTGAGTTCTGTGACCGCCGCAGACACGGCCGTGTA | |
| | | TTACTGTGCGAGAGATTTAAAGGGAAAGACGTGGATACAGACCCCCT | |
| | | TTGACTACTGGGGCCAGGGAATCCTGGTCACCGTCTCCTCAGCCTCCA | |
| | | CCAAGGGCCCATCTGTCTTCCCCCTGGCACCCTCCTCCAAGAGCACCT | |
| | | CTGGGGGCACAGCGGCCCTGGGCTGCCTGGTCAAGGACTACTTCCCC | |
| | | GAACCGGTGACGGTGTCGTGGAACTCAGGCGCTCTGACCAGCGGCGT | |
| | | GCACACCTTCCCGGCTGTCCTACAGTCCTCAGGA | |
| | LC-DNA | CAGTCTGCCCTGACTCAGCCTGCCTCCGTGTCTGGGTCTCCTGGACAG | 1758 |
| | | TCGATCACCATCTCCTGCACTGGAACCAGCAGTGACGTTGGTGCTTAT | |
| | | AACTATGTCTCCTGGTACCAACAGCACCCAGGCAAAGCCCCCAAACT | |
| | | CATGATTTATGAGGTCAGTAATCGGCCCTCAGGGGTTTCTAATCGCTT | |
| | | CTCTGGCTCCAAGTCTGGCAACACGGCCTCCCTGACCATCTCTGGGCT | |
| | | CCAGGCTGAGGACGAGGCTGATTATTACTGCAGCTCATATACAAGCA | |
| | | GCACCTTCTTCGGAACTGGGACCACGGTCACCGTCCTAGGTCAGCCCA | |
| | | AGGCCAACCCCACTGTCACTCTGTTCCCGCCCTCCTCTGAGGAGCTCC | |
| | | AAGCCAACAAGGCCACACTAGTGTGTCTGATCAGTGACTTCTACCCG | |
| | | GGAGCTGTGACAGTGGCCTGGAAGGCAGATGGCAGCCCCGTCAAGGC | |
| | | GGGAGTGGAGACCACCACACCCTCCAAACAAAGCAACAACAAGTAC | |
| | | GCGGCCAGCAGCTAC | |
| S564- | HC-DNA | GAGGTGCAGCTGGTGGAGTCTGGGGGAGGCTTGGTCCAGCCTGGGGG | 1759 |
| 14 | | GTCCCTGAGACTCTCCTGTGCAGCCTCTGGACTCACCTTTAGTAGCTA | |
| | | TTGGATGAGCTGGGCCCGCCAGGCTCCAGGGAAGGGGCTGGAGTGGG | |
| | | TGGCCAATATAAAGAAAGATGGAAGTGAGAAATACTATGTGGACTCT | |
| | | GTGAAGGGCCGATTCACCATCTCCAGAGACAACGCCAAGAACTCACT | |
| | | GTATCTGCAAATGAACAGCCTGAGAGTCGAGGACACGGCTGTGTATT | |
| | | ACTGTGCGAGTGAACCTCCCCACTACGGTGGTAACTCCGGGGCTGAA | |
| | | TACTTCCAGCACTGGGGCCAGGGCACCCTGGTCACCGTCTCCTCAGCA | |
| | | CCCACCAAGGCTCCGGATGTGTTCCCCATCATATCAGGGTGCAGACA | |
| | | CCCAAAGGATAACAGCCCTGTGGTCCTGGCATGCTTGATAACTGGGT | |
| | | ACCACCC | |
| | LC-DNA | TCCTATGTGCTGACTCAGCCACCCTCAGTGTCAGTGGCCCCAGGAAAG | 1760 |
| | | ACGGCCAGGATTACCTGTGGGGGAAACAACATTGGAAGTAAAAGTGT | |
| | | GCACTGGTACCAGCAGAGGCCAGGCCAGGCCCCTGTACTGGTCATCT | |
| | | ATTATGATAGCGACCGGCCCTCAGGGATCCCTGAGCGATTCTCTGGCT | |
| | | CCAACTCTGGGAACACGGCCACCCTGACCATCAGCAGGGTCGAGGCC | |
| | | GGGGATGAGGCCGACTATTACTGTCAGGTGTGGGATAGTAGTAGTGA | |
| | | TCACCATTATGTCTTCGGAACTGGGACCAAGGTCACCGTCCTAGGTCA | |
| | | GCCCAAGGCCAACCCCACTGTCACTCTGTTCCCGCCCTCCTCTGAGGA | |
| | | GCTTCAAGCCAACAAGGCCACACTGGTGTGTCTCATAAGTGACTTCTA | |
| | | CCCGGGAGCCGTGACAGTGGCCTGGAAGGCAGATAGCAGCCCCGTCA | |
| | | AGGCGGGAGTGGAGACCACCAAACCCTCCAAACAGAGCAACAACAA | |
| | | GTACGCGGCCAGCAGCTA | |
| S564- | HC-DNA | CAGGTGCAGCTGGTGCAGTCTGGGGCTGAGGTGAAGAAGCCTGGGGC | 1761 |
| 68 | | CTCAGTGAAGGTCTCCTGCAAGGCTTCTGGATACATCTTCACCGGCTA | |
| | | TTATATGCACTGGGTGCGACAGGCCCCTGGACAAGGGCTTGAGTGGA | |
| | | TGGGATGGATCAACCCTAACAGTGGTGGCACTAACTATGCACAGAAG | |
| | | TTTCAGGGCAGGGTCACCATGACCAGGGACACGTCCATCACCACAGC | |
| | | CTACATGGAGCTGAGCAGGCTGAGATCTGACGACACGGCCTTTTATT | |
| | | ACTGTGCGAGAGTCAAGAGGTTTTCGATTTTTGGAGTGGAGCTTGACT | |
| | | ACTGGGGCCAGGGAACCCTGGTCACCGTCTCCTCAGCCTCCACCAAG | |
| | | GGCCCATCGGTCTTCCCCCTGGCACCCTCCTCCAAGAGCACCTCTGGG | |
| | | GGCACAGCGGCCCTGGGCTGCCTGGTCAAGGACTACTTCCCCGAACC | |
| | | GGTGACGGTGTCGTGGAACTCAGGCGCCCTGACCAGCGGCGTGCACA | |
| | | CCTTCCCGGCTGTCCTACAGTCCTCAGGA | |
| | LC-DNA | CAGTCTGCCCTGACTCAGCCTCCCTCCGCGTCCGGGTCTCCTGGACAG | 1762 |
| | | TCAGTCACCATCTCCTGCACTGGAACCAGCAGTGACGTTGGTGGTTAT | |
| | | AACTATGTCTCCTGGTACCAACAGCACCCAGGCAAAGCCCCCAAACT | |
| | | CATGATTTATGAGGTCAGTAAGCGGCCCTCAGGGGTCCCTGATCGCTT | |
| | | CTCTGGCTCCAAGTCTGGCAACACGGCCTCCCTGACCGTCTCTGGGCT | |
| | | CCAGGCTGAGGATGAGGCTGATTATTTCTGCAGCTCATATGCAGACA | |
| | | GCAACAATTTGGTATTCGGCGGAGGGACCAAGCTGACCGTCCTAGGT | |
| | | CAGCCCAAGGCTGCCCCCTCGGTCACTCTGTTCCCGCCCTCCTCTGAG | |
| | | GAGCTTCAAGCCAACAAGGCCACACTGGTGTGTCTCATAAGTGACTT | |
| | | CTGCCCGGGAGCCGTGACAGTGGCCTGGAAGGCAGATAGCAGCCCCG | |
| | | TCAAGGCGGGAGTGGAGACCACCACACCCTCCAAACAAAGCAACAA | |
| | | CAAGTACGCGGCCAGCAGCTACC | |
| S564- | HC-DNA | CAGGTGCAGCTGCAGGAGTCGGGCCCAGGACTGGTGAAGCCTTCGGA | 1763 |
| 98 | | GACCCTGTCCCTCACCTGCACTGTCTCTGGTGGCTCCATCAGTAGTTA | |
| | | CTACTGGAGCTGGATCCGGCAGCCCCCAGGGAAGGGACTGGAGTGGA | |
| | | TTGGGTATATCTATTACAGTGGGAGCACCAACTACAACCCCTCCCTCA | |
| | | AGAGTCGAGTCACCATATCAGTAGACACGTCCAAGAACCAGTTCTCC | |
| | | CTGAAGCTGAGCTCTGTGACCGCCGCAGACACGGCCGTGTATTACTGT | |
| | | GCGAGACATCAATCGCGGTGGAATATAGTGGCTACGATGGACTTTGA | |
| | | CTACTGGGGCCAGGGAACCCTGGTCACCGTCTCCTCAGCCTCCACCAA | |
| | | GGGCCCATCGGTCTTCCCCCTGG | |
| | LC-DNA | GACATCCAGATGACCCAGTCTCCATCCTCCCTGTCTGCATCTGTAGGA | 1764 |
| | | GACAGAGTCACCATCACTTGCCGGGCAAGTCAGAGCATTCGCAGCTA | |
| | | TTTAAATTGGTATCAGCAGAAACCAGGGAAAGCCCCTAAGCTCCTGA | |
| | | TCTATGCTGCATCCAGTTTGCAAAGTGGCGTCCCATCAAGGTTCAGTG | |
| | | GCAGTGGATCTGGGACAGATTTCACTCTCACCATCGGCAGTCTGCAAC | |
| | | CTGAAGATTTTGCAACTTACTACTGTCAACAGAGTTACAGTACCTCCG | |
| | | TGGCGTTCGGCCAAGGGACCAAGGTGGAAATCAAACGAACTGTGGCT | |
| | | GCACCATCTGTCTTCATCTTCCCGCCATCTGATGAGCAGTTGAAATCT | |
| | | GGAACTGCCTCTGTTGTGTGCCTGCTGAATAACTTCTATCCCAGAGAG | |
| | | GCCAAAGTACAGTGGAAGGTGGATAACGCCCTCCAATCGGGTAACTC | |
| | | CCAGGAGAGTGTCACAGAGCAGGACAGCAAGGACAGCACCTACAGC | |
| | | CTCAGCAGCACCCTGACGCTGAGCAAAGCAGACTACGAGA | |
| S564- | HC-DNA | CAGGTGCGGCTGCAGGAGTCGGGCCCAGGACTGGTGAAGCCTTCACA | 1757 |
| 105 | | GACCCTGTCCCTCACCTGCACTGTCTCTGGTGGCTCCATCAGCAGTGG | |
| | | TAGTTACTACTGGAGCTGGATCCGGCAGCCCGCCGGGAAGGGACTGG | |
| | | AGTGGATTGGGCGTTTCCATACCAGTGGGAGCACCAACTACAATCCC | |
| | | TCCCTCAAGAGTCGAGTCACCATATCAGTAGACACGTCCAAGAACCA | |
| | | GTTCTCCCTGAAGCTGAGTTCTGTGACCGCCGCAGACACGGCCGTGTA | |
| | | TTACTGTGCGAGAGATTTAAAGGGAAAGACGTGGATACAGACCCCCT | |
| | | TTGACTACTGGGGCCAGGGAATCCTGGTCACCGTCTCCTCAGCCTCCA | |
| | | CCAAGGGCCCATCTGTCTTCCCCCTGGCACCCTCCTCCAAGAGCACCT | |
| | | CTGGGGGCACAGCGGCCCTGGGCTGCCTGGTCAAGGACTACTTCCCC | |
| | | GAACCGGTGACGGTGTCGTGGAACTCAGGCGCTCTGACCAGCGGCGT | |
| | | GCACACCTTCCCGGCTGTCCTACAGTCCTCAGGA | |
| | LC-DNA | CAGTCTGCCCTGACTCAGCCTGCCTCCGTGTCTGGGTCTCCTGGACAG | 1758 |
| | | TCGATCACCATCTCCTGCACTGGAACCAGCAGTGACGTTGGTGCTTAT | |
| | | AACTATGTCTCCTGGTACCAACAGCACCCAGGCAAAGCCCCCAAACT | |
| | | CATGATTTATGAGGTCAGTAATCGGCCCTCAGGGGTTTCTAATCGCTT | |
| | | CTCTGGCTCCAAGTCTGGCAACACGGCCTCCCTGACCATCTCTGGGCT | |
| | | CCAGGCTGAGGACGAGGCTGATTATTACTGCAGCTCATATACAAGCA | |
| | | GCACCTTCTTCGGAACTGGGACCACGGTCACCGTCCTAGGTCAGCCCA | |
| | | AGGCCAACCCCACTGTCACTCTGTTCCCGCCCTCCTCTGAGGAGCTCC | |
| | | AAGCCAACAAGGCCACACTAGTGTGTCTGATCAGTGACTTCTACCCG | |
| | | GGAGCTGTGACAGTGGCCTGGAAGGCAGATGGCAGCCCCGTCAAGGC | |
| | | GGGAGTGGAGACCACCACACCCTCCAAACAAAGCAACAACAAGTAC | |
| | | GCGGCCAGCAGCTAC | |
| S564- | HC-DNA | CAGGTGCAGCTGGTGCAGTCTGGGGCTGAGGTGAAGAAGCCTGGGGC | 1765 |
| 134 | | CTCAGTGAAGGTCTCCTGCAAGGCTTCTGGATACACCTTCACCGGCTA | |
| | | CTATATGCACTGGGTGCGACAGGCCCCTGGACAAGGGCTTGAGTGGA | |
| | | TGGGATGGATCAACCCTAACAGTGGTGGCACAAACTATGCACAGAAG | |
| | | TTTCAGGGCAGGGTCACCATGACCAGGGACACGTCCATCAACACAGC | |
| | | CTACATGGAGCTGAGCAGGCTGAGATCTGACGACACGGCCGTGTATT | |
| | | ACTGTACGAGAGTCGGGAGGTTTTCGATTTTTGGAGTGGAGCTTGACT | |
| | | ACTGGGGCCAGGGAACCCTGGTCACCGTCTCCTCAGCCTCCACCAAG | |
| | | GGCCCATCTGTCTTCCCCCTGGCACCCTCCTCCAAGAGCACCTCTGGG | |
| | | GGCACAGCGGCCCTGGGCTGCCTGGTCAAGGACTACTTCCCCGAACC | |
| | | GGTGACGGTGTCGTGGAACTCAGGCGCCCTGACCAGCGGCGTGCACA | |
| | | CCTTCCCGGCTGTCCTACAGTCCTCAGGA | |
| | LC-DNA | CAGTCTGCCCTGACTCAACCTCCCTCCGCGTCCGGGTCTCCTGGACAG | 1766 |
| | | TCAGTCACCATCTCCTGCACTGGAACCAGCAGTGACGTTGGTGGTTAT | |
| | | AACTATGTCTCCTGGTACCAGCAACACCCAGGCAAAGCCCCCAAACT | |
| | | CATGATTTATGAGGTCAATAAGCGGCCCTCAGGGGTCCCTGATCGCTT | |
| | | CTCTGGCTCCAAGTCTGGCAACACGGCCTCCCTGACCGTCTCTGGGCT | |
| | | CCAGGCTGACGATGAGGCTGATTATTACTGCAGCTCATATGCAGGCA | |
| | | GCAACAATTTGGTTTTCGGCGGAGGGACCAAGCTGACCGTCCTAGGT | |
| | | CAGCCCAAGGCTGCCCCCTCGGTCACTCTGTTCCCGCCCTCCTCTGAG | |
| | | GAGCTTCAAGCCAACAAGGCCACACTGGTGTGTCTCATAAGTGACTT | |
| | | CTACCCGGGAGCCGTGACAGTGGCCTGGAAGGCAGATAGCAGCCCCG | |
| | | TCAAGGCGGGAGTGGAGACCACCACACCCTCCAAACAAAGCAACAA | |
| | | CAAGTACGCGGCCAGCAGCTA | |
| S564- | HC-DNA | CAGGTGCTCCTGGTGCAGTCTGGGGCTGAGGTGAAGAAGCCTGGGGC | 1767 |
| 138 | | CTCAGTGAAGGTCTCCTGCAAGGCTTCTGGATACACCTTCACCGGCTA | |
| | | CTATCTGCACTGGGTGCGACAGGCCCCTGGACAAGGGCTTGAGTGGA | |
| | | TGGGATGGATCAACCCTATCAGTGGTGGCACAAACTATGCACAGAAT | |
| | | TTTCAGGACAGGGTCACCATGACCAGGGACACGTCCATCATCACAGC | |
| | | CTACATGGAACTGAGCAGGCTGAGATCTGACGACACGGCCGTGTATT | |
| | | ACTGTGCGAGACTTGCCTATTATTATGATAGTAGTGCTTACCGGGGTG | |
| | | CTTTTGATATCTGGGGCCAAGGGACAATGGTCACCGTCTCTTCAGCCT | |
| | | CCACCAAGGGCCCATCTGTCTTCCCCCTGGCACCCTCCTCCAAGAGCA | |
| | | CCTCTGGGGGCACAGCGGCCCTGGGCTGCCTGGTCAAGGACTACTTC | |
| | | CCCGAACCGGTGACGGTGTCGTGGAACTCAGGCGCCCTGACCAGCGG | |
| | | CGTGCACACCTTCCCGGCTGTCCTACAGTCCTCAGG | |
| | LC-DNA | CAGTCTGCCCTGACTCAGCCTGCCTCCGTGTCTGGGTCTCCTGGACAG | 1768 |
| | | TCGATCACCATCTCCTGCACTGGAACCAGCAGTGACGTTGGTGGTTAT | |
| | | AACTATGTCTCCTGGTACCAACAGCACCCAGGCAAAGCCCCCAAACT | |
| | | CATGATTTATGAGGTCAGTAATCGGCCCTCAGGGGTTTCTGATCGCTT | |
| | | CTCTGGCTCCAAGTCTGGCAACACGGCCTCCCTGACCATCTCTGGGCT | |
| | | CCAGGCTGAGGACGAGGCTGATTATTACTGCAGCTCATATACAAGCA | |
| | | GCAGCACTTATGTCTTCGGAACTGGGACCAAGGTCACCGTCCTAGGTC | |
| | | AGCCCAAGGCCAACCCCACTGTCACTCTGTTCCCGCCCTCCTCTGAGG | |
| | | AGCTCCAAGCCAACAAGGCCACACTAGTGTGTCTGATCAGTGACTTCT | |
| | | ACCCGGGAGCTGTGACAGTGGCCTGGAAGGCAGATGGCAGCCCCGTC | |
| | | AAGGCGGGAGTGGAGACCACCAAACCCTCCAAACAGAGCAACAACA | |
| | | AGTACGCGGCCAGCAGCTA | |
| S564- | HC-DNA | CAGGTGCAGCTGGTGGAGTCTGGGGGAGGCGTGGTCCAGCCTGGGAG | 1769 |
| 152 | | GTCCCTGAGACTCTCCTGTGCAGCGTCTGGATTCACCTTCAGTTACTA | |
| | | TGGCATGCACTGGGTCCGCCAGGCTCCAGGCAAGGGGCTGGAGTGGG | |
| | | TGGCAGTTATATGGTATGATGGAAGTAATAAACACTATGCAGACTCC | |
| | | GTGAAGGGCCGATTCACCATCTCCAGAGACAATTCCAAGAACACGCT | |
| | | GTATCTGCAAATGAACAGCCTGAGAGCCGAGGACACGGCTGTGTACT | |
| | | ACTGTGCGAAAAATGCGGCCCCCTATTGTAGTGGTGGTAGCTGCTAC | |
| | | GGTACCTACTTTGACTACTGGGGCCAGGGAACCCTGGTCACCGTCTCC | |
| | | TCAGCCTCCACCAAGGGCCCATCTGTCTTCCCCCTGGCACCCTCCTCC | |
| | | AAGAGCACCTCTGGGGGCACAGCGGCCCTGGGCTGCCTGGTCAAGGA | |
| | | CTACTTCCCCGAACCGGTGACGGTGTCGTGGAACTCAGGCGCCCTGA | |
| | | CCAGCGGCGTGCACACCTTCCCGGCTGTCCTACAGTCCTCAGGA | |
| | LC-DNA | GACATCCAGATGACCCAGTCTCCATCCTCCCTGTCTGCATCTGTAGGA | 1770 |
| | | GACAGAGTCACCATCACTTGCCAGGCGAGTCAGGACATTAACAACTA | |
| | | TTTAAATTGGTATCAGCAGAAACCAGGGAAAGCCCCTAAGCTCCTGA | |
| | | TCTACGATGCATCCAATTTGGAAACAGGGGTCCCATCAAGGTTCAGT | |
| | | GGGAGTGGATCTGGGACAGATTTTACTTTCACCATCAGCAGCCTGCA | |
| | | GCCTGAAGATATTGCAACATATTACTGTCAACAGTATGACAATGTCCC | |
| | | TCCGCACACTTTTGGCCAGGGGACCAAGCTGGAGATCAAACGAACTG | |
| | | TGGCTGCACCATCTGTCTTCATCTTCCCGCCATCTGATGAGCAGTTGA | |
| | | AATCTGGAACTGCCTCTGTTGTGTGCCTGCTGAATAACTTCTATCCCA | |
| | | GAGAGGCCAAAGTACAGTGGAAGGTGGATAACGCCCTCCAATCGGGT | |
| | | AACTCCCAGGAGAGTGTCACAGAGCAGGACAGCAAGGACAGCACCT | |
| | | ACAGCCTCAGCAGCACCCTGACGCTGAGCAAAGCAGACTACGAGAA | |
| S564- | HC-DNA | CAGGTCCAGCTGGTGCAGTCTGGGGCTGAGGTGAAGAAGCCTGGGTC | 1771 |
| 218 | | CTCGGTGAAGGTCTCCTGCAAGGCTTCTGGAGGCACCTTCAGCAGCTA | |
| | | TGCTATCAGCTGGGTGCGACAGGCCCCTGGACAAGGGCTTGAGTGGA | |
| | | TGGGAGGGATCATCCCTATCTTTGGTACAGCAAAGTACGCACAGAAG | |
| | | TTCCAGGGCAGAGTCACGATTACCGCGGACGAATCCACGAGCACAGC | |
| | | CTACATGGAGCTGAGCAGCCTGAGATCTGAGGACACGGCCGTGTATT | |
| | | ACTGTGCGAGAGGAAAAGATGGCTACAATCCCTGGGGCGCTTTTGAT | |
| | | ATCTGGGGCCAAGGGACAATGGTCACCGTCTCTTCAGGGAGTGCATC | |
| | | CGCCCCAACCCTTTTCCCCCTCGTCTCCTGTGAGAATTCCCCGTCGGA | |
| | | TACGAGCAGCGTG | |
| | LC-DNA | CAGTCTGCCCTGACTCAGCCTCCCTCCGCGTCCGGGTCTCCTGGACAG | 1772 |
| | | TCAGTCACCATCTCCTGCACTGGAACCAGCAGTGACGTTGGTGGTTAT | |
| | | AACTATGTCTCCTGGTACCAACAGCACCCAGGCAAAGCCCCCAAACT | |
| | | CATGATTTATGAGGTCAGTAAGCGGCCCTCAGGGGTCCCTGATCGCTT | |
| | | CTCTGGCTCCAAGTCTGGCAACACGGCCTCCCTGACCGTCTCTGGGCT | |
| | | CCAGGCTGAGGATGAGGCTGATTATTACTGCAGCTCATATGCAGGCA | |
| | | GCAACAATTTCGGGGTATTCGGCGGAGGGACCAAGCTGACCGTCCTA | |
| | | GGTCAGCCCAAGGCTGCCCCCTCGGTCACTCTGTTCCCGCCCTCCTCT | |
| | | GAGGAGCTTCAAGCCAACAAGGCCACACTGGTGTGTCTCATAAGTGA | |
| | | CTTCTACCCGGGAGCCGTGACAGTGGCCTGGAAGGCAGATAGCAGCC | |
| | | CCGTCAAGGCGGGAGTGGAGACCACCACACCCTCCAAACAAAGCAAC | |
| | | AACAAGTACGCGGCCAGCAGCTACCTGAGCCTGACGCCTGAGCAGTG | |
| | | GAAGTCCCAC | |
| S564- | HC-DNA | GAGGTGCAGCTGGTGGAGTCTGGGGGAGGCTTGGTCCAGCCCGGGGG | 1773 |
| 249 | | GTCCCTGAGACTCTCCTGCGTAGCCTCTGGATTCACCTTCAGTGACTA | |
| | | TGCTATGCACTGGGTCCGCCAGGCTCCAGGGAAGGGACTGGAATATA | |
| | | TTGCAGCTATTAGTAGCAATGGGGGTAGGACATATTATGCAGACTCT | |
| | | GTGAAGGACAAATTCACCATCTCCAGAGACAATTCCAAGAACATCTT | |
| | | GTATCTTCACATGGGCAGCCTGAGAGCGGAGGACACGGCTGTGTATT | |
| | | TCTGTGCGAGAGATCCCCAGTCATGGGTGACTTCCACCACAGCCCATT | |
| | | TCCAGCACTGGGGCCAGGGCACCCTGGTCACCGTCTCCTCAGCATCCC | |
| | | CGACCAGCCCCAAGGTCTTCCCGCTGAGCCTCTGCAGCACCCAGCCA | |
| | | GATGGGAACGTGGTCATCGCCTGCCTGGTCCAGGGCTTCTTCCCCCAG | |
| | | GAGCCACTCAGTGTGACCTGGAGCGAAAGCGGACAGGGCGTGACCGC | |
| | | CAGAAACTTCCC | |
| | LC-DNA | CAGTCTGCCCTGACTCAGCCTGCCTCCGTGTCTGGGTCTCCTGGACAG | 1774 |
| | | TCGATCACCATCTCCTGCACTGGAACCAGCAGTGACATTGGTGGTTAT | |
| | | AACTATGTCTCCTGGTACCAACAACACCCAGGCAAAGCCCCCAAACT | |
| | | CATCATTTCTGATGTCTCTAATCGGCCCTCAGGGGTTTCTAGTCGCTTC | |
| | | TCTGGCTCCAAGTCTGGCAACACGGCCTCCCTGACCATCTCTGGACTC | |
| | | CAGACTGAGGACGAGGCTCATTATTATTGCAGCTCGTTTAGAAGTGG | |
| | | CATCACTCTCGGGGTATTCGGCGGGGGGACCAAGCTGACCGTCCTAG | |
| | | GTCAGCCCAAGGCTGCCCCCTCGGTCACTCTGTTCCCGCCCTCCTCTG | |
| | | AGGAGCTTCAAGCCAACAAGGCCACACTGGTGTGTCTCATAAGTGAC | |
| | | TTCTACCCGGGAGCCGTGACAGTGGCCTGGAAGGCAGATAGCAGCCC | |
| | | CGTCAAGGCGGGAGTGGAGACCACCACACCCTCCAAACAAAGCAAC | |
| | | AACAAGTACGCGGCCAGCAGCTA | |
| S564- | HC-DNA | CAGGTGCAGCTGGTGCAGTCTGGGGCTGAGGTGAAGAAGCCTGGGGC | 1775 |
| 265 | | CTCAGTGAAGGTCTCCTGCAAGGCTTCTGGATACACCTTCACCGGCTA | |
| | | CTATATGCACTGGGTGCGTCAGGCCCCTGGACAAGGGCTTGAGTGGA | |
| | | TGGGATGGATCAACCCTAACAGTGGTGCCATAAACTATGCACAGAAG | |
| | | TTTCAGGGCAGGGTCACCATGACCAGGGACACGTCCATCAGCACAGC | |
| | | CTACATGGAGCTGAGCAGCCTGAGATCTGACGACACGGCCGTGTATT | |
| | | ACTGTGCGAGAGTCGGGAGGTTTTCGATTTTTGGAGTGGAGCTTGATA | |
| | | ACTGGGGCCAGGGAACCCTGGTCACCGTCTCCTCAGCCTCCACCAAG | |
| | | GGCCCATCTGTCTTCCCCCTGGCACCCTCCTCCAAGAGCACCTCTGGG | |
| | | GGCACAGCGGCCCTGGGCTGCCTGGTCAAGGACTACTTCCCCGAACC | |
| | | GGTGACGGTGTCGTGGAACTCAGGCGCCCTGACCAGCGGCGTGCACA | |
| | | CCTTCCCGGCTGTCCTACAGTCCTCAGGA | |
| | LC-DNA | CAGTCTGCCCTGACTCAGCCTCCCTCCGCGTCCGGGTCTCCTGGACAG | 1776 |
| | | TCAGTCACCATCTCCTGCACTGGAACCAGCAGTGACGTTGGTGGTTAT | |
| | | AACTTTGTCTCCTGGTACCAACAGCACCCAGGCAAAGCCCCCAAACT | |
| | | CATGATTTATGAGGTCAGTAAGCGGCCCTCAGGGGTCCCTGATCGCTT | |
| | | CTCTGGCTCCAAGTCTGGCAACACGGCCTCCCTGACCGTCTCTGGGCT | |
| | | CCAGGCTGAGGATGAGGCTGATTATTACTGCAGCTCATATGGAGGCA | |
| | | GCAACAATTTGATATTCGGCGGAGGGACCAGGCTGACCGTCCTAGGT | |
| | | CAGCCCAAGGCTGCCCCCTCGGTCACTCTGTTCCCGCCCTCCTCTGAG | |
| | | GAGCTTCAAGCCAACAAGGCCACACTGGTGTGTCTCATAAGTGACTT | |
| | | CTACCCGGGAGCCGTGACAGTGGCCTGGAAGGCAGATAGCAGCCCCG | |
| | | TCAAGGCGGGAGTGGAGACCACCACACCCTCCAAACAAAGCAACAA | |
| | | CAAGTACGCGGCCAGCAGCTACCTGAGCCTGACGCCTGAGCAGTGGA | |
| | | AGTCCCAC | |
| S564- | HC-DNA | CAGGTGCAGCTGCAGGAGTCGGGCCCAGGACTGGTGAAGCCTTCGGA | 1777 |
| 275 | | GACCCTGTCCCTCACCTGCACTGTCTCTGGTGGCTCCATCAGTAGTTA | |
| | | CTACTGGAGCTGGATCCGGCAGCCCCCAGGGAAGGGACTGGAGTGGA | |
| | | TTGGGTATATCTATTACAGTGGGAGCACCAAGTACAACCCCTCCCTCA | |
| | | AGAGTCGAGTCACCATATCAGTAGACACGTCCAAGAAGCAGTTCTCC | |
| | | CTGAAGTTGAGCTCTGTGACCGCCGCAGACACGGCCGTGTATTACTGT | |
| | | GCGAGACATATAAAGATAGGAGTGGTCGGAGGCCTTACTTTTGACTT | |
| | | CTGGGGCCAGGGAACCCTGGTCACCGTCTCCTCAGGGAGTGCATCCG | |
| | | CCCCAACCCTTTTCCCCCTCGTCTCCTGTGAGAATTCCCCGTCGGATA | |
| | | CGAGCAGCGTG | |
| | LC-DNA | GACATTCAGATGACCCAGTCTCCATCCTCCCTGTCTGCATCTATAGGA | 1778 |
| | | GACAGAGTCACCATCACTTGCCGGGCAAGTCAGAGCATTAGCACCTA | |
| | | TTTAAATTGGTATCAGCAGAAACCAGGGAAAGCCCCTAAACTCCTGA | |
| | | TCTATGCTGCATCCAGTTTGCAAAGTGGGGTCCCATCAAGGTTCAGTG | |
| | | GCAGTGGATCTGGGGCAGATTTCACTCTCACCATCAGCAGTCTGCAAC | |
| | | CTGAAGATTTTGCAACTTACTACTGTCAACAGAGTTACAGTACCCCGC | |
| | | TCACTTTCGGCGGAGGGACGAAGGTGGAGATCAAACGAACTGTGGCT | |
| | | GCACCATCTGTCTTCATCTTCCCGCCATCTGATGAGCAGTTGAAATCT | |
| | | GGAACTGCCTCTGTTGTGTGCCTGCTGAATAACTTCTATCCCAGAGAG | |
| | | GCCAAAGTACAGTGGAAGGTGGATAACGCC | |
| S564- | HC-DNA | CAGGTGCAGCTGGTGCAGTCTGGGGCTGAGGTGAAGAAGCCTGGGGC | 1779 |
| 287 | | CTCAGTGAAGGTCTCCTGCAAGGCTTCTGGATACACCTTCACCGGCTA | |
| | | CTATATGCACTGGGTGCGACAGGCCCCTGGACAAGGGCTTGAGTGGA | |
| | | TGGGATGGATCAACCCTAACAGTGGTGGCACAAACTATGCACAGAAG | |
| | | TTTCAGGGCAGGGTCACCATGACCAGGGACACGTCCATCAGCACAGC | |
| | | CTACATGGAGCTGAGCAGGCTGAGATGTGACGACACGGCCGTGTATT | |
| | | ACTGTGCGAGAGCCTCAACTCCGTATAGCAGTGGCTCCTGGGCGGAC | |
| | | TACTGGGGCCAGGGAACCCTGGTCACCGTCTCCTCAGGGAGTGCATC | |
| | | CGCCCCAACCCTTTTCCCCCTCGTCTCCTGTGAGAATTCCCCGTCGGA | |
| | | TACGAGCAGCGTG | |
| | LC-DNA | CAGTCTGCCCTGACTCAGCCTGCCTCCGTGTCTGGGTCTCCTGGACAG | 1780 |
| | | TCGATCACCATCTCCTGCACTGGAACCAGCAGTGACGTTGGTGGTTAT | |
| | | AACTATGTCTCCTGGTACCAACAACACCCAGGCAAAGCCCCCAAACT | |
| | | CATGATTTATGATGTCAGTAATCGGCCCTCAGGGGTTTCTAATCGCTT | |
| | | CTCTGGCTCCAAGTCTGGCAACACGGCCTCCCTGACCATCTCTGGGCT | |
| | | CCAGGCTGAGGACGAGGCTGATTATTACTGCAGCTCATATGCAAGCA | |
| | | GCAGCACTTGGGTGTTCGGCGGAGGGACCAAGCTGACCGTCCTAGGT | |
| | | CAGCCCAAGGCTGCCCCCTCGGTCACTCTGTTCCCGCCCTCCTCTGAG | |
| | | GAGCTTCAAGCCAACAAGGCCACACTGGTGTGTCTCATAAGTGACTT | |
| | | CTACCCGGGAGCCGTGACAGTGGCCTGGAAGGCAGATAGCAGCCCCG | |
| | | TCAAGGCGGGAGTGGAGACCACCACACCCTCCAAACAAAGCAACAA | |
| | | CAAGTACGCGGCCAGCAGCTATCTGAGCCTGACGCC | |
| S166- | HC-DNA | CAGGTGCAGCTGGTGGAGTCTGGGGGAGGCTTGGTCAAGCCTGGAGG | 1781 |
| 32 | | GTCCCTGAGACTCTCCTGTGCAGCCTCTGGATTCACCTTCAGTGACTA | |
| | | CTACATGAGCTGGATCCGCCAGGCTCCAGGGAAGGGGCTGGAGTGGG | |
| | | TTTCATACATTAGTATTAGTGATACGACCATATACTACGCAGACGCTG | |
| | | TGCAGGGCCGATTCACCATGTCCAGGGACAACGCCAAGAACTCACTG | |
| | | TATCTGCAAATGAACAGCCTGAAGGCCGAGGACACGGCCGTGTATTA | |
| | | CTGTGCGAGAGCTAGCCCATATTGTGGTGGTGATTGCTCTTTCGGCAA | |
| | | TGCTTTTGATATCTGGGGCCTAGGGACAATGGTCACCGTCTCTTCAG | |
| | LC-DNA | GACATCCAGATGACCCAGTCTCCTTCCACCCTGTCTGCATCTGTAGGA | 1782 |
| | | GACAGAGTCACCATCACTTGCCGGGCCAGTCAGAGTATTTTTAGCTGG | |
| | | TTGGCCTGGTATCAGCAGAAACCAGGGAAAGCCCCTAAGCTCCTGAT | |
| | | CTATGATGCCTCCAGTTTGGAAAGTGGGGTCCCATCAAGGTTCAGCG | |
| | | GCAGTGGATCTGGGACAGAATTCACTCTCACCATCAGCAGCCTGCAG | |
| | | CCTGATGATTTTGCAACTTATTACTGCCAACAGTATAATAGTTATTGG | |
| | | ACGTTCGGCCAAGGGACCAAGGTGGAAATCAAAC | |
| S305- | HC-DNA | CAGGTGCAGTTGGTGGAGTCTGGGGGAGGCGTGGTCCAGCCTGGAAG | 1783 |
| 223 | | GTCCCTGAGACTCTCCTGTGCAGCGTCTGGATTCACCTTCAGAAACTT | |
| | | TGGCATGCACTGGGTCCGCCAGGCTCCAGGCAAGGGGCTGGAGTGGG | |
| | | TGGCATTTATATGGACTGCTGAAAGTGATAAATTCTATGCAGACTCCG | |
| | | TGAAGGGCCGATTCACCGTCTCCAGAGACAATTCGAAGAACACGCTG | |
| | | TATTTGGAAATGAACAGCCTGAGAGCCGAGGACACGGCTGTGTATTA | |
| | | CTGTACGAAAGCGATGGACGTCTGGGGCAGAGGGACCACGGTCACCG | |
| | | TCTCCTCAG | |
| | LC-DNA | GAAATTGTGTTGACACAGTCTCCAGCCACCCTGTCTTTGTCTCCAGGG | 1784 |
| | | GAAAGAGCCACCCTCTCCTGCAGGGCCAGTCAGAGTGTTAGCACCTC | |
| | | CTTAGCCTGGTACCAACAGAAATGTGGCCAGGCTCCCCGGCTCCTCAT | |
| | | CTATGATGCATCCAACAGGGCCACTGGCATCCCAGCCAGGTTCAGTG | |
| | | GCAGTGGGTCTGGGACAGACTTCACTCTCACCATCAGCAGCCTAGAG | |
| | | CCTGAAGATTTTGCAGTTTATTACTGTCAACAGCGTGGCAACTGGCCC | |
| | | TTCACTTTCGGCCCTGGGACCAGAGTGGATATCAAAC | |
| S305- | HC-DNA | CAGGTCCAGCTGGTACAGTCTGGGGCTGAGGTGAAGAAGCCTGGGGC | 1785 |
| 399 | | CTCAGTGAAGGTCTCCTGCAAGGTTTCCGGATACACCCTCACTGAATT | |
| | | ATCCATGCACTGGGTGCGACAGGCTCCTGGAAAAGGGCTTGAGTGGA | |
| | | TGGGAGGTTTTGATCCTGAAGATGGTGAAACAATCTACGCACAGAAG | |
| | | TTCCAGGGCAGAGTCACCATGACCGAAGACACATCTACAGACACAGC | |
| | | CTACATGGAGCTGAGCAGCCTGAGATCTGAGGACACGGCCGTGTATT | |
| | | ACTGTGCAACAGGGGGATTGGGTTGTTCTAATGGGGTATGCAACAAC | |
| | | TGGTTCGACCCCTGGGGCCTGGGAACCCTGGTCACCGTCTCCTCAG | |
| | LC-DNA | GAAATAGTGATGACGCAGTCTCCAGCCACCCTGTCTGTGTCTCCAGGG | 1786 |
| | | GAAAGAGCCACCCTCTCCTGCAGGGCCAGTCAGAGTATTACTAGCAA | |
| | | CTTAGCCTGGTACCAGCAGAAACCTGGCCAGGCTCCCAGGCTCCTCAT | |
| | | CTATGGTGCATCCACCAGGGCCACTGGTATCCCAGCCAGGTTCAGTG | |
| | | GCAGTGGGTCTGGGACAGAGTTCACTCTCACCATCAGCAACCTGCAG | |
| | | TCTGAAGATTTTGCAGTTTATTACTGTCAGCAGTATAATAACTGGCCT | |
| | | CTGACGTTCGGCCAAGGGACCAAGGTGGAAATCAAAC | |
| S305- | HC-DNA | CAGGTCCAGCTGGTACAGTCTGGGGCTGAGGTGAAGAAGCCTGGGGC | 1787 |
| 1456 | | CTCAGTGAAGGTCTCCTGCAAGGTTTCCGGATACACCCTCACTGAATT | |
| | | ATCCATGCACTGGGTGCGGCAGGCTCCTGGAAAAGGGCTTGAGTGGA | |
| | | TGGGAGGTTTTGATCCTGAAGATGCTGAAACAATCTACGCACAGAAG | |
| | | TTCCAGGGCAGAGTCACCATGACCGAGGACACATCTACAGACACAGC | |
| | | CTACATGGAGCTGAGCAGCCTGAGATCTGAGGACACGGCCGTGTATT | |
| | | ACTGTGCAACAGGGGGCTTTCCCGTCAATAGCCTTTACGATATTTTGA | |
| | | CTGGTTACCTTGACTACTGGGGCCAGGGAACCCTGGTCACCGTCTCCT | |
| | | CAG | |
| | LC-DNA | GAAATAGTGATGACGCAGTCTCCAGCCACCCTGTCTGTGTCTCCAGGG | 1788 |
| | | GAAAGAGCCACCCTCTCCTGCAGGGCCAGTCAGAATGTTAGCAGCAA | |
| | | CTTAGCCTGGTACCAACAGAAACCTGGCCAGGCTCCCAGGCTCCTCAT | |
| | | CTATGGTGCATCCACCAGGGCCACTGGTATCCCGGCCAGGTTCAGTG | |
| | | GCAGTGGGTCTGGGACAGAGTTCACTCTCACCATCAGCAGCCTGCAG | |
| | | TCTGAAGATTTTGCAGTTTATTACTGTCAGCAGTATAATAACTGGCCT | |
| | | CACACTTTCGGCCCTGGGACCAAAGTGGATATCAAAC | |
| R125- | HC-DNA | CAGGTGCAGATGGTGGAGTCTGGGGGAGGCGTGGTCCAGCCTGGGGG | 1789 |
| 306 | | GTCCCTGAGACTCTCCTGTGCGGTCTCTGGCTTCACCTTCAACAACTTT | |
| | | GGCATGCACTGGGTCCGCCAGGCTCCAGGCAAGGGGCTGGAGTGGGT | |
| | | GGCATTTATTTCATATGAAGGAAGTAAAAAGTCTTATGCAGACTCCGT | |
| | | GAAGGGCCGATTCACCATCTCCAGAGACAGTTCCAAGAACACGTTGT | |
| | | ATCTGCAAATGAACAGCCTGAGACCTGAGGACACGTCTGTCTATTACT | |
| | | GTGCGAAAGAATTAGCGATATTCATGATCTATGCAGGTCGCTACGGTT | |
| | | TGGACGTCTGGGGCCAAGGGACCACGGTCACCGTCTCCTCA | |
| | LC-DNA | GTCTGCCCTGACTCAGCCTGCCTCCGTGTCTGGGTCTCCTGGACAGTC | 1790 |
| | | GATCACCATCTCCTGCACTGGAATCTACAGTGATGTTGATGATTATAC | |
| | | TTCTGTCTCCTGGTACCAACAACACCCAGGCAAAGCCCCCACACTCAT | |
| | | TATTTATGATGTCACTAAGCGGCCCTCAGGGGTTTCCAATCGTTTCTC | |
| | | TGCCTCCAACTCTGACAATACCGCCTCCCTGACAATCTCTGGGCTCCA | |
| | | GGCTGAGGACGAGGCTGAGTATTACTGCTGCTCACGTGGAAGTGCCA | |
| | | CCAATTCTTATGTCTTCGGAACCGGGACCAAGGTCACTGTCCTA | |
| R125- | HC-DNA | CAAGTGCAGCTGCAGGAATCGGGCCCAGGACTGGTGAAGCCTTCGGA | 1791 |
| 444 | | GACCCTGTCCCTCACCTGCAATGTCTCAGGTGGCTCCGTCAAATTTTT | |
| | | CTATTGGAGTTGGATCCGGCAGCCCCCCGGGAAGGGACTGGAGTGGA | |
| | | TTGGATATATCTATTACAGTGGGAGCACCAACTACAACCCCTCCCTCA | |
| | | AGAGTCGAGTGACCATGTCAGTGGACTCGCCCAACAACCAATTCTCC | |
| | | CTGAAACTGAGGTCTGTGACTGCTGCAGACACGGCCGTATATTATTGT | |
| | | GCGAGAGTGGGGGGGGACTGTAGCAGTGGAATATGCCGAACTTATGA | |
| | | CTACTATGCTATGGATGTCTGGGGCCAAGGGACCACGGTCACTGTCTC | |
| | | CTCA | |
| | LC-DNA | CAGTCTGTGCTGACGCAGCCGCCCTCGCTGTCTGGGGCCCCAGGGCA | 1792 |
| | | GAGGGTCACCATCTCCTGCACTGGGAGCCGCTCCAACATCGGGGCTG | |
| | | GCTATGCTGTCCACTGGTACCAGCAACTTCCAGGAACAGCCCCCAAA | |
| | | CTCCTCATCTCCGAGAACACCAATGGGCCCTCAGGAGTCCCTGACCG | |
| | | ATTCTCTGGGTCCAAGTCTGACTCCTCGGCCTCCCTGGCCATCACCGA | |
| | | CCTCCAGGCTGCGGATGAGGCTGATTATTACTGCCAGTCATACGACG | |
| | | GCAGCCTGAGCGGTTGGGTGTTCGGCGGGGGGACCAAACTGACCGTC | |
| | | CT | |
| R3- | HC-DNA | CAGGTCACCTTGAAGGAGTCTGGTCCTGTGCTGGTGAAACCCACAGA | 1793 |
| 428 | | GACCCTCACGCTGACCTGCACCGTCTCTGGGTTCTCACCCAGCAATGC | |
| | | TAGAATGGGTGTGAGCTGGATCCGTCAGCCCCCAGGGAAGGCCCTGG | |
| | | AATGGCTTGCACACGTGTATTCGAATGACGAGAAATCGTACAGCACA | |
| | | TCTCTGAAGAGGAGGCTCACCATCTCCAAGGACACCTCCAAACGGCA | |
| | | GGTGGTCCTTATTATGACCAACTTGGACCCTGCGGACACAGGCACAT | |
| | | ATTACTGTGCACGGGCTCAAGACCCCCGGATACGGTTCGGGGAATTA | |
| | | TTACCCGTCTACTTTGACAACTGGGGCCAGGGAACCCTGGTCACCGTC | |
| | | TCCTCAG | |
| | LC-DNA | GACATCCAGATGACCCAGTCTCCATCCTCCCTGTCTGCATTTGTGGGA | 1794 |
| | | GACAGAGTTACCATCAGTTGCCGGGCAAGTCAGAGCATTGTCAGCTA | |
| | | TTTAAATTGGTATCAGCAGAAACCAGGGAAAGCCCCTAAGCTCCTTTT | |
| | | GTATAGTGCATCCACTTTGCAAAGTGGGGTCCCATCAAGGTTCAGTGG | |
| | | CAGTGGATCTGGGACAGATTTCACTCTCACCATCAGCAGTCTGCAACC | |
| | | TGAAGATTTTGCAACTTACTACTGTCAACAGGGTTACACTACCCCGTG | |
| | | GACGTTCGGCCAAGGGACCAAGGTGGAAATCAAAC | |
| R478 | HC-DNA | GAGGTGCAGCTGTTGGAGTCTGGGGGAGGCTTGGTACTGCCTGGGGG | 1795 |
| 910- | | GTCCCTGAGACTCTCCTGTGCAGCCTCTGGATTCAGCTTTAGCAGCTA | |
| 171 | | TGCCATGAGCTGGGTCCGCCAGGCTCCAGGGAAGGGGCTGGAGTGGG | |
| | | TCTCAGGTATTAGTGGTCGTGGTACTAGCACATACTACGCAGACTCCG | |
| | | TGAAGGGCCGGTTCACCATCTCCAGAGACAATTCCAAGAACACGCTG | |
| | | TATCTGCAAATGAACAGCCTGAGAGCCGAGGACACGGCCGTATATTA | |
| | | TTGTGCGAAAGATCGGGTCAGCTATGGTTCCCCTTACTACTTTGACTA | |
| | | CTGGGGCCAGGGAACGCTGGTCACCGTCTCCTCAG | |
| | LC-DNA | GACATTGTGTTGACGCAGTCTCCAGCCACCCTGTCTTTGTCTCCAGGG | 1796 |
| | | GAAAGAGCCACCCTCTCCTGCGGGGCCAGTCAGAGTGTTAGCAGCAA | |
| | | CTACTTAGCCTGGTACCAGCAGGAACCTGGCCTGGCGCCCAGGCTCCT | |
| | | CATCTATGATGCATCCAGCAGGGCCACTGGCATCCCAGACAGGTTCA | |
| | | GTGGCAGTGGGTCTGGGACAGACTTCACTCTCACCATCAGCAGACTG | |
| | | GAGCCTGAAGATTTTGCAGTGTATTACTGTCAGCAGTATGGTAGCTCA | |
| | | TCCACCTTCGGCCAAGGGACACGACTGGAGATTAAAC | |
| R478 | HC-DNA | CAGGTGCAGCTGGTGGAGTCTGGGGGAGGCGTGGTCCAGCCTGGGAG | 1797 |
| 910- | | GTCCCTGAGACTCTCCTGTGCAGCGTCTGGATTCACCTTCAGTAGCTA | |
| 23 | | TGGCATGCACTGGGTCCGCCAGGCTCCAGGCAAGGGGCTGGAGTGGG | |
| | | TGGCAGTTATATGGTATGATGGAAGTAATAAATACTATGCAGACTCC | |
| | | GTGAAGGGCCGATTCACCATCTCCAGAGACAATTCCAAGAACACGCT | |
| | | GTATCTGCAAATGAACAGCCTGAGAGCCGAGGACACGGCTGTGTATT | |
| | | ACTGTGCGAGAGCTCCTGACTACTGGGGCCAGGGAACCCTGGTCACC | |
| | | GTCTCCTCAG | |
| | LC-DNA | GCCATCCAGATGACCCAGTCTCCATCCTCCCTGTCTGCATCTGTAGGA | 1798 |
| | | GACAGAGTCACCATCACTTGCCGGGCAAGTCAGGGCATTAGAAATGA | |
| | | TTTAGGCTGGTATCAGCAGAAACCAGGGAAAGCCCCTAAGCTCCTGA | |
| | | TCTATGCTGCATCCAGTTTACAAAGTGGGGTCCCATCAAGGTTCAGCG | |
| | | GCAGTGGATCTGGCACAGATTTCACTCTCACCATCAGCAGCCTGCAGC | |
| | | CTGAAGATTTTGCAACTTATTACTGTCTACAAGATTACAATTACCCGT | |
| | | ACACTTTTGGCCAGGGGACCAAGCTGGAGATCAAAC | |
| R478 | HC-DNA | GAGGTGCAGCTGTTGGAGTCTGGGGGAGGCTTGGTACAGCCTGGGGG | 1799 |
| 910- | | GTCCCTGAGACTCTCCTGTGCAGTCTCTGGATTCACCGTTAGTAACTA | |
| 25 | | TGGCCTGAGCTGGGTCCGCCAGGGTCCAGGGAAGGGGCTAGAGTGGG | |
| | | TCGCAGCTATTAGTGGTAGTGGTGGTAGGACATACTATGCAGACTCC | |
| | | GTGAAGGGCCGGTTCACCATCTCCAGAGACAATTCCAAGAACACGCT | |
| | | GTTTCTGCAATTGAACAGCCTGAGAGCCGAGGACACGGCCGTATATT | |
| | | ACTGTGCGAAAGGTCGAGATGAACTGGTGGTAGGTGCTACTCAGGAC | |
| | | TACTGGGGCCAGGGAACCCTGGTCACCGTCTCCTCAG | |
| | LC-DNA | GACATCCAGATGACCCAGTCTCCATCCTCCCTGTCTGCATCTGTAGGG | 1800 |
| | | GACAGAGTCACCATCACTTGCCGGGCAAATCAGAACATTAGGAGCTA | |
| | | TTTAAATTGGTATCAGCAGACACCAGGGAAAGCCCCTAAACTCCTGA | |
| | | TCTATGCTACATCCAGTTTGCAAAGTGGGGTCCCATCAAGGTTCAGTG | |
| | | GCAGTGGATCTGGGACACAGTTCACTCTCACCATCAGCAGTCTGCAA | |
| | | CCTGAAGATTTTGCAACTTACTACTGTCAACAGAGTTACAGTATCCCA | |
| | | TTCGATTTCGGCCCTGGGACCAAAGTGGATATCAAAC | |
| R478 | HC-DNA | GAGGTGCAGCTGTTGGAGTCTGGGGGAGACTTAGTACAGCCTGGGGG | 1801 |
| 910-3 | | GTCCCTGAGACTCTCCTGTGTAGCCTCTGGATTCACCTTTAGGAGTTA | |
| | | TGCCATGACCTGGGTCCGCCAGGCTCCAGGGAAGGGGCTGGAGTGGG | |
| | | TCTCAAGTATTAGTGGTAGTGGTGGCGGCACATACTACGCAGACTCC | |
| | | GTGAAGGGCCGGTTCACCATCTCCAGAGACAATTCCAAGAACACGCT | |
| | | GTTTCTGCAAATGAACAGCCTGAGAGCCGAGGACACGGCCGTATATT | |
| | | ACTGTGCGAGAGGGAGGGAGGACTGGTTATTAAGCCTAACATATGGC | |
| | | TACTGGGGCCAGGGAGCCCTGGTCACCGTCTCCTCAG | |
| | LC-DNA | GACATCCAGATGACCCAGTCTCCATCCTCCCTGTCTGCATCTGTAGGA | 1802 |
| | | GACAGAGTCCCCATCACTTGCCGGGCAAGTCAGAGCATTAGCAGCTA | |
| | | TTTAAATTGGTATCAGCAGAGACCAGGGAAAGCCCCTAAGCTCCTGA | |
| | | TCTATGCTGCATCCAGTTTGCAAAGTGGGGTCCCATCAAGGTTCAGTG | |
| | | GCAGTGGATCTGGGACAGATTTCACTCTCACCATCAGCAGTCTGCAAC | |
| | | CTGAAGATTTTGCAACTTACTACTGTCAACAGAGTTACACTATCCCTC | |
| | | CGACTTTCGGCGGAGGGACCAAGGTGGAGATCAAAC | |
| R478 | HC-DNA | GAGGTGCAGCTGGTGGAGTCTGGGGGAGGCTTGGTCCAGCCTGGGGG | 1803 |
| 910- | | GTCCCTGAGACTCTCCTGTGCAGCCTCTGGATTCACCTTTGGTAGCTA | |
| 421 | | TTGGATGAACTGGGTCCGCCAGGCTCCAGGGAAGGGGCTGGAGTGGG | |
| | | TGGCCAACATAAACGAAGATGGAAGTGAGAAATACTATGTGGACTCT | |
| | | GTGAAGGGCCGATTCACCATCTCCAGAGACAACGCCAAGAACTCACT | |
| | | ATATCTGCAAATGAACAGCCTGAGAGCCGAGGACACGGCTGTGTATT | |
| | | ACTGTGCGAGAGGACATTCTCTGGGTGAGTGGGGCCAGGGATCCCCG | |
| | | GTCACCGTCTCCTCAG | |
| | LC-DNA | TCTTCTGAGCTGACTCAGGACCCTGCTGTGTCTGTGGCCTTGGGACAG | 1804 |
| | | ACAGTCAGGATCACATGCCAAGGAGACAGCCTCAGAAGCTATTCTGC | |
| | | AAGCTGGTACCAGCAGAAGCCAGGACAGGCCCCTGTACTTGTCATCT | |
| | | ATATTAAAAACAAACGACCCTCAGGGATCCCAGACCGATTCTCTGGC | |
| | | TCCAGCTCAGGAAACACAGCTTCCTTGACCATCACTGGGGCTCAGGC | |
| | | GGAAGATGAGGCTGACTATTACTGTAACTCCCGGGACAGCAGTGGTG | |
| | | ACCATCTGGTGTTCGGCGGAGGGACCAAGCTGACCGTCCTAG | |
| R478 | HC-DNA | GAGGTGCAGCTGGTGGAGTCTGGGGGAGGCTTGGTACAGCCTGGGGG | 1805 |
| 910-8 | | GTCCCTGAGACTCTCCTGTGCAGCCTCTGGATTCACCTTCAGTAGCTA | |
| | | TAGCATGAACTGGGTCCGCCAGGCTCCAGGGAAGGGGCTGGAGTGGG | |
| | | TTTCATACATTAGTAGTAGTAGTAGTACCATATACTACGCAGACTCTG | |
| | | TGAAGGGCCGATTCACCATCTCCAGAGACAACGCCAAGAACTCACTG | |
| | | TATCTGCAAATGAACAGCCTGAGAGCCGAGGACACGGCTGTGTATTA | |
| | | CTGTGCGAGGGCCAACTGGAACGACATGTACTTCGATCTCTGGGGCC | |
| | | GTGGCACCCTGGTCACTGTCTCCTCAG | |
| | LC-DNA | GAAATTGTGTTGACGCAGTCTCCAGGCACCCTGTCTTTGTCTCCAGGG | 1806 |
| | | GAAAGAGCCACCCTCTCCTGCAGGGCCAGTCAGAGTGTTAGCAGCAG | |
| | | CTACTTAGCCTGGTACCAGCAGAAACCTGGCCAGGCTCCCAGGCTCCT | |
| | | CATCTATGGTGCATCCAGCAGGGCCACTGGCATCCCAGACAGGTTCA | |
| | | GTGGCAGTGGGTCTGGGACAGACTTCACTCTCACCATCAGCAGACTG | |
| | | GAGCCTGAAGATTTTGCAGTGTATTACTGTCAGCAGTATGGTAGCTCA | |
| | | CCTTTTGGCCAGGGGACCAAGCTGGAGATCAAAC | |
| S195- | HC-DNA | CAGGTGCAGCTGGTGGAGTCTGGGGGAGGCGTGGTCCAGCCTGGGAG | 1807 |
| 637 | | GTCCCTGAGACTCTCCTGTGCAGCCTCTGGATTCACCTTCAGTAGCAA | |
| | | TGCTATGCACTGGGTCCGCCAGGCTCCAGGCAAGGGGCTAGAGTGGG | |
| | | TGGCAGTTATATCATATGATGGAGATAATAAATACTACGCAGACTCC | |
| | | GTGAAGGGCCGATTCACCATCTCCAGAGACAATTCCAAGAATACGCT | |
| | | GTATCTGCAAATGAACAGCCTGAGAACTGAGGACACGGCTGTGTATT | |
| | | ACTGTGCGAGGTCGTTGGGCGGAAACTACTTCTACGGTATGGACGTCT | |
| | | GGGGCCAAGGGACCACGGTCACCGTCTCCTCA | |
| | LC-DNA | GAAATTGTGTTGACGCAGTCTCCAGGCACCCTGTCTTTGTCTCCAGGG | 1808 |
| | | GAAAGAGCCACCCTCTCCTGCAGGGCCAGTCAGAGTGTTAGCAGCAG | |
| | | CTACTTAGCCTGGTACCAGCAGAAACCTGGCCAGGCTCCCAGGCTCCT | |
| | | CATCTATGGTGCATCCAGCAGGGCCGCTGGCATCCCAGACAGGTTCA | |
| | | GTGGCAGTGGGTCTGGGACAGACTTCACTCTCACCATCAGCAGACTG | |
| | | GAGCCTGAAGATTTTGCAGTGTATTACTGTCAGCAGTTTGGTGGCTCT | |
| | | TGGACGTTCGGCCCAGGGACCAAGGTGGAAATCAAAC | |
| S380- | HC-DNA | GAGGTGCAACTGGTGGAGTCTGGGGGAGGCTTGGTACAGCCTGGGGG | 1809 |
| 1191 | | GTCCCTGAGACTCTCCTGTGCGGCCTCTGGATTCACCTTCAGTGGCTA | |
| | | TATCATGAACTGGGTCCGCCAGGCTCCAGGGAAGGGACTGGAGTGGG | |
| | | TTTCATCCATCAGTGGTGGTAGTATTTCCATATCCTACGCAGGCTCTG | |
| | | TGAAGGGCCGATTCACCATCTCCCGAGACAATGCCAAGAACTCACTG | |
| | | TATCTGCAAATGAACAGCCTGAGAGCCGGGGACTCGGCTGTTTATTA | |
| | | CTGTGCTCTTACGACTTTTGGAGTGGTTACCTCTTATCCCTCCTTTGAC | |
| | | TACTGGGGCCAGGGAACCCTGGTCACCGTCTCCTC | |
| | LC-DNA | CAGTCTGTGCTGACGCAGCCGCCCTCAGTGTCTGGGGCCCCAGGGCA | 1810 |
| | | GAGGGTCACCATCTCCTGCACTGGGAGCAGCTCCAACATCGGGGCAG | |
| | | GTTATGATGTACACTGGTACCAGCAGCTTCCAGGAACAGCCCCCAAA | |
| | | CTCCTCATCTATGGTAACAGTAATCGGCCCTCAGGGGTCCCTGACCGA | |
| | | TTCTCTGGCTCCAAGTCTGGCACCTCAGCCTCCCTGGCCATCACTGGG | |
| | | CTCCAGGCTGAGGATGAGGCTGATTATTACTGCCAGTCCTATGACAGC | |
| | | AGCTTGAGTGGTTATGTGTTCGGCGGAGGGACCGAGCTGACCGTCCT | |
| | | AG | |
| S451- | HC-DNA | CAGGTCCAGCTGGTGCAGTCTGGGGCTGAGGTGAAGAAGCCTGGATC | 1811 |
| 101 | | CTCGGTGAAGGTCTCCTGCAAGGCTTCTGGAGGCACCTTCAGCAACTA | |
| | | TGCTATCAGCTGGGTGCGACAGGCCCCTGGACCAGGGCTTGAGTGGA | |
| | | TGGGAGGGATCATCCCTTTCCTTGGTATAGCAAACTACGCACAGAAG | |
| | | TTCCAGGGCAGAGTCACGATTACCGCGGACAAATCCACGAGCACAGC | |
| | | CTACATGGAGCTGAGCAGCCTGAGATCTGAGGACACGGCCGTGTATT | |
| | | ACTGTGCGAGGGCCCCCGGGTATAGTAGTGTAGGGTCGACAAACTAC | |
| | | TTCGACCCCTGGGGCCAGGGAACCCTGGTCACCGTCTCCTCAG | |
| | LC-DNA | CAGTCTGTGCTGACGCAGCCGCCCTCAGTGTCTGGGGCCCCAGGGCA | 1812 |
| | | GAGGGTCACCATCTCCTGCACTGGGAGCAGCTCCAACATCGGGGCAG | |
| | | GTTATGATGTACACTGGTACCAGCAACTTCCAGGAGCAGCCCCCAAA | |
| | | CTCCTCATCTATGCAAACAGCAATCGGCCCTCAGGGGTCCCTGACCGA | |
| | | TTCTCTGGCTCCAAGTCTGGCACCTCAGCCTCCCTGGCCATCACTGGG | |
| | | CTCCAGGCTGAGGATGAGGCTGATTATTACTGCCAGTCCTATGACAGC | |
| | | AGCCTGAGTGGTTATGTCTTCGGAACTGGGACCAAGGTCACCGTCCTA | |
| | | G | |
| S451- | HC-DNA | CAGGTGCAGCTGCAGGAGTCGGGCCCAGGACTGGTGGAGCCTTCACA | 1813 |
| 11 | | GACCCTGTCCCTCACCTGCACTGTCTCTGGTGGCTCCATCAGCAGTGG | |
| | | TGGTTACTACTGGAGTTGGATCCGCCAGCACCCAGGGAAGGGCCTGG | |
| | | AGTGGATCGGGTACATCTCTTACAGTGGTGGAAGCACCTACTACAAC | |
| | | CCGTCCCTCAAGAGTGTAGTTACCATATCACTAGACACGTCTAAGAAT | |
| | | CAGTTCTCCCTGAAGCTGAGCTCTGTGACTGCCGCGGACACGGCCGTG | |
| | | TATTACTGTGCGAGAGTTTCCTATGGTTCGGGGAGTTTTCGTTTTGACT | |
| | | ACTGGGGCCAGGGAACCCTGGTCACCGTCTCCTCAG | |
| | LC-DNA | CAGTCTGCCCTGACTCAGCCTCGCTCAGTGTCCGGGTCTCCTGGACAG | 1814 |
| | | TCAGTCACCATCTCCTGCACTGGAACCAGCAGTGATGTTGGTGGTTAT | |
| | | AACTATTTCTCCTGGTACCAACACCACGCAGGCAAAGCCCCCAAACT | |
| | | CATGATTTATGATGTCAGTAAGCGGCCCTCAGGGGTCCCTGATCGCTT | |
| | | CTCTGGCTCCAAGTCTGGCAACACGGCCTCCCTGACCATCTCTGGCCT | |
| | | CCAGGCTGAGGATGAGGCTGATTATTACTGCTGCTCATATGCAGGCA | |
| | | CCTACACTTGGGTGTTCGGCGGAGGGACCAAGCTGACCGTCCTAG | |
| S451- | HC-DNA | CAGGTGCAGCTGCAGGAGTCGGGCCCAGGACTGGTGAAGCCTTCGGA | 1815 |
| 1101 | | GACCCTGTCCCTCACCTGCACTGTCTCTGGTGGCTCCATCAATAGTTA | |
| | | CTCCTGGAGCTGGATCCGGCAGCCCGCCGGGAAGGGACTGGAGTGGA | |
| | | TTGGGCGTATCTCTACCAGTGGGAGCACCAACAACAACCCCTCCCTCA | |
| | | AGAGTCGAGTCACCATGTCAGTAGACACGTCCAAGGACCAGTTCTCC | |
| | | CTGAAGCTGACCTCTGTGACCGCCGCGGACACGGCCGTGTATTACTGT | |
| | | GCGAGAATTAATGGGGCAGCAGCTGGGACGCCCTTTGACTACTGGGG | |
| | | CCAGGGAACCCTGGTCACCGTCTCCTCAG | |
| | LC-DNA | GACATCCAGATGACCCAGTCTCCATCCTCCCTGTCTGCATCTGTAGGA | 1816 |
| | | GACAGAGTCACCATCACTTGCCGGGCAAGTCAGAGCATTAGCAACTA | |
| | | TTTAAATTGGTATCAGCAGAAACCAGGGAAAGCCCCTAAGCTCCTGA | |
| | | TCTATGCTGCATCCAGTTTGCAAAGTGGGGTCCCATCAAGGTTCAGTG | |
| | | GCAGTGGATCTGGGACAGATTTCACTCTCACCATCAGCAGTCTGCAAC | |
| | | CTGAAGATTTTGCAACTTACTACTGTCAACAGAGTTACAGGACATTCG | |
| | | GCCAAGGGACCAAGGTGGAAATCAAAC | |
| S451- | HC-DNA | GAAGTGCAGCTGGTGGAGTCTGGGGGAGGCTTGGTACAGCCCGGCAG | 1817 |
| 1439 | | GTCCCTGAGACTCTCCTGTGCAGCCTCTGGATTCACCTTTGATGATTTT | |
| | | GCCATGCACTGGGTCCGGCAAGCTCCAGGGAAGGGCCTGGAGTGGGT | |
| | | CTCAGGTATTAGTTGGAATGGTGGTATCATAGGCTATGCGGACTCTGT | |
| | | GAAGGCCCGATTCACCATCTCCAGAGACAACGCCAAGAACTCCCTGT | |
| | | ATCTGCAAATGAACAGTCTGAGAGCTGAGGACACGGCCTTGTATTAC | |
| | | TGTGCAAAGACCAGGGGGGATTATGATTACGTTTGGGGGAGCCGTTC | |
| | | TTCGAATTACTACTTTGACTACTGGGGCCAGGGAACCCTGGTCACGGT | |
| | | CTCCTCAG | |
| | LC-DNA | GACATCCAGATGACCCAGTCTCCATCCTCCCTGTCTGCATCTGTAGGA | 1818 |
| | | GACAGAGTCACCATCACTTGCCAGGCGAGTCAGGACATTAGCAACTA | |
| | | TTTAAATTGGTATCAGAAGAAACCAGGGAAAGCCCCTAAGCTCCTGA | |
| | | TCTACGATGCAACCAATTTGGAAACAGGGGTCCCATCAAGGTTCAGT | |
| | | GGAAGTGGATCTGGGACAGAGTTTACTTTCACCATCAGCAGCCTGCA | |
| | | GCCTGAAGATATTGCAACATATTATTGTCAACAGTATGATAATGTCCC | |
| | | TCCAATCACTTTCGGCCCTGGGACCAAAGTGGATATGAAAC | |
| S451- | HC-DNA | CAGGTGCAGCTGGTGGAGTCTGGGGGAGGCGTGGTCCAGCCTGGGAG | 1807 |
| 1451 | | GTCCCTGAGACTCTCCTGTGCAGCCTCTGGATTCACCTTCAGTAGCAA | |
| | | TGCTATGCACTGGGTCCGCCAGGCTCCAGGCAAGGGGCTAGAGTGGG | |
| | | TGGCAGTTATATCATATGATGGAGATAATAAATACTACGCAGACTCC | |
| | | GTGAAGGGCCGATTCACCATCTCCAGAGACAATTCCAAGAATACGCT | |
| | | GTATCTGCAAATGAACAGCCTGAGAACTGAGGACACGGCTGTGTATT | |
| | | ACTGTGCGAGGTCGTTGGGCGGAAACTACTTCTACGGTATGGACGTCT | |
| | | GGGGCCAAGGGACCACGGTCACCGTCTCCTCA | |
| | LC-DNA | GAAATTGTGTTGACGCAGTCTCCAGGCACCCTGTCTTTGTCTCCAGGG | 1808 |
| | | GAAAGAGCCACCCTCTCCTGCAGGGCCAGTCAGAGTGTTAGCAGCAG | |
| | | CTACTTAGCCTGGTACCAGCAGAAACCTGGCCAGGCTCCCAGGCTCCT | |
| | | CATCTATGGTGCATCCAGCAGGGCCGCTGGCATCCCAGACAGGTTCA | |
| | | GTGGCAGTGGGTCTGGGACAGACTTCACTCTCACCATCAGCAGACTG | |
| | | GAGCCTGAAGATTTTGCAGTGTATTACTGTCAGCAGTTTGGTGGCTCT | |
| | | TGGACGTTCGGCCCAGGGACCAAGGTGGAAATCAAAC | |
| S451- | HC-DNA | GAGCCGCAGCTGGTGGAATCTGGGGGAGGCTTGGTACAGCCGGGGGG | 1819 |
| 1477 | | GTCCCTGAGACTCTCCTGTGCAGGCTCTGGATTCGGCTTCATATCTTA | |
| | | CCCCATGAACTGGGTCCGCCAGGCTCCAGGAAAGGGGCCGGAGTGGA | |
| | | TTTCAAATATTAGGACAACCGCTGAAGGTGGAACCTTTTACGCAGACT | |
| | | CTGTGAAGGGCCGATTCACCATGTCCAGAGACGACGGCAAGACTTCA | |
| | | ATATATCTTCAAATGAACAGCCTGAGAGACGAGGACACGGCTACATA | |
| | | TTACTGTGCGAGAGACTCTTCCTACGGATTTGATCTCTGGGGCCAGGG | |
| | | GACAGTGGTCACCGTCTCCTCAG | |
| | LC-DNA | CAGTCTGCCCTGACTCAGCCTCGCTCAGTGTCCGGGTCTCCTGGACAG | 1820 |
| | | TCAGTCACCATCTCCTGCACTGGAACCAGTAGTGATGTTGGTGGTTAT | |
| | | AACTATGTCTCCTGGTATCAACAACGCCCAGGGAAAGCCCCCGAATT | |
| | | GATGATTTATCATGTCAGTGAGCGGCCCTCAGGGGTCCCTGATCGCTT | |
| | | CTCTGGCTCCAAATCTGGCAACACGGCCTCCCTGACCATCTCTAGGCT | |
| | | CCAGGCTGAGGATGAGGCTGATTATTACTGCTGCTCATATGCAGGCA | |
| | | GCCACTTTTGGGTGTTCGGCGGAGGGACCAAGTTGACCGTCCTAG | |
| S451- | HC-DNA | GAGGTGCAGCTGGTGGAGTCTGGGGGAGGCTTGGTCCAGCCTGGGGG | 1803 |
| 1503 | | GTCCCTGAGACTCTCCTGTGCAGCCTCTGGATTCACCTTTGGTAGCTA | |
| | | TTGGATGAACTGGGTCCGCCAGGCTCCAGGGAAGGGGCTGGAGTGGG | |
| | | TGGCCAACATAAACGAAGATGGAAGTGAGAAATACTATGTGGACTCT | |
| | | GTGAAGGGCCGATTCACCATCTCCAGAGACAACGCCAAGAACTCACT | |
| | | ATATCTGCAAATGAACAGCCTGAGAGCCGAGGACACGGCTGTGTATT | |
| | | ACTGTGCGAGAGGACATTCTCTGGGTGAGTGGGGCCAGGGATCCCCG | |
| | | GTCACCGTCTCCTCAG | |
| | LC-DNA | TCTTCTGAGCTGACTCAGGACCCTGCTGTGTCTGTGGCCTTGGGACAG | 1804 |
| | | ACAGTCAGGATCACATGCCAAGGAGACAGCCTCAGAAGCTATTCTGC | |
| | | AAGCTGGTACCAGCAGAAGCCAGGACAGGCCCCTGTACTTGTCATCT | |
| | | ATATTAAAAACAAACGACCCTCAGGGATCCCAGACCGATTCTCTGGC | |
| | | TCCAGCTCAGGAAACACAGCTTCCTTGACCATCACTGGGGCTCAGGC | |
| | | GGAAGATGAGGCTGACTATTACTGTAACTCCCGGGACAGCAGTGGTG | |
| | | ACCATCTGGTGTTCGGCGGAGGGACCAAGCTGACCGTCCTAG | |
| S451- | HC-DNA | GAGGTGCAACTGGTGGAGTCTGGGGGAGGCTTGGTACAGCCTGGGGG | 1809 |
| 1522 | | GTCCCTGAGACTCTCCTGTGCGGCCTCTGGATTCACCTTCAGTGGCTA | |
| | | TATCATGAACTGGGTCCGCCAGGCTCCAGGGAAGGGACTGGAGTGGG | |
| | | TTTCATCCATCAGTGGTGGTAGTATTTCCATATCCTACGCAGGCTCTG | |
| | | TGAAGGGCCGATTCACCATCTCCCGAGACAATGCCAAGAACTCACTG | |
| | | TATCTGCAAATGAACAGCCTGAGAGCCGGGGACTCGGCTGTTTATTA | |
| | | CTGTGCTCTTACGACTTTTGGAGTGGTTACCTCTTATCCCTCCTTTGAC | |
| | | TACTGGGGCCAGGGAACCCTGGTCACCGTCTCCTC | |
| | LC-DNA | CAGTCTGTGCTGACGCAGCCGCCCTCAGTGTCTGGGGCCCCAGGGCA | 1810 |
| | | GAGGGTCACCATCTCCTGCACTGGGAGCAGCTCCAACATCGGGGCAG | |
| | | GTTATGATGTACACTGGTACCAGCAGCTTCCAGGAACAGCCCCCAAA | |
| | | CTCCTCATCTATGGTAACAGTAATCGGCCCTCAGGGGTCCCTGACCGA | |
| | | TTCTCTGGCTCCAAGTCTGGCACCTCAGCCTCCCTGGCCATCACTGGG | |
| | | CTCCAGGCTGAGGATGAGGCTGATTATTACTGCCAGTCCTATGACAGC | |
| | | AGCTTGAGTGGTTATGTGTTCGGCGGAGGGACCGAGCTGACCGTCCT | |
| | | AG | |
| S451- | HC-DNA | CAGGTGCAACTGCAGGAGTCGGGCCCAGGACTGGTGAAGCCTTCACA | 1821 |
| 1921 | | GACCCTGTCCCTCACCTGCACTGTCTCTGGTGGCTCCATCAGCAGTGG | |
| | | TGATTACTACTGGAGCTGGATCCGCCAGCCCCCAGGGAAGGGCCTGG | |
| | | AGTGGCTTGGGTACATCTATTACAGTGGGAGCACCTTCTACAACCCGT | |
| | | CCCTCAAGAGTCGAGTTACCATATCAGTAGACACGTCCAAGAACCAG | |
| | | TTCTCCCTGAGGCTGACCTCTGTGACTGCCGCAGACACGGCCGTGTAT | |
| | | TTCTGTGCCAGAGAGGAGAATAAATTCAACTATGGCCATCATCCCCTC | |
| | | AATGGAGTCTTTGCCTACTGGGGCCAGGGAACCCTGGTCACCGTCTCC | |
| | | TCAG | |
| | LC-DNA | GACATCGTGATGACCCAGTCTCCAGACTCCCTGGCTGTGTCTCTGGGC | 1822 |
| | | GAGAGGGCCACCATCAACTGCAAGTCCAGCCAGAGTGTTTTGTACAG | |
| | | CCCCAACAATAAGAACTACTTAGCTTGGTACCAGCAGAAACCAGGAC | |
| | | AGCCTCCTAACCTGCTCATCTACTGGGCATCTACCCGGGAATCCGGGG | |
| | | TCCCTGACCGATTCAGTGGCAGCGGGTCTGGGACAGATTTCACTCTCA | |
| | | CCATCAACAGCCTGCAGGCTGAAGATGTGGCAGTTTATTACTGTCAGC | |
| | | AATCTTATAATACTCCTCGGACGTTCGGCCAAGGGACCAAGGTGGAA | |
| | | ATCAAAC | |
| S451- | HC-DNA | CAGGTCACCTTGAAGGAGTCTGGTCCTGTGCTGGTGAAACCCACAGA | 1823 |
| 337 | | GACCCTCACGCTGACCTGCACCGTCTCTGGGTTCTCACTCATCAATGC | |
| | | TAGGTTGGGTGTGAGCTGGATCCGTCAGCCCCCAGGGAAGGCCCTGG | |
| | | AGTGGCTTGCACACATTTTTTCGGATGACGAGAAATCCTACAGCACAT | |
| | | CTCTGAAGAGCAGGCTCACCATCTCCAAGGACACCTCCAAGAGCCAG | |
| | | GTGGTCCTTACCATGACCAACATGGACCCTGTGGACACAGCCACATA | |
| | | TTACTGTGCACGGATATCTTGGCCCCCTTATGGTTCGGGGACTTATTA | |
| | | TATTAAGGCTTTTGATATCTGGGGCCAAGGGACACTGGTCACCGTCTC | |
| | | TTCAG | |
| | LC-DNA | CAGTCTGCCCTGACTCAGCCTGTCTCCGTGTCTGGGTCTCCTGGACAG | 1824 |
| | | TCGATCACCATCTCCTGCACTGGAACCAGCAGTGACGTTGGTGGTTAT | |
| | | AACTATGTCTCCTGGTACCAACAGCACCCAGGCAAAGCCCCCAAACT | |
| | | CATGATTTCTGAGGTCAGTAATCGACCCTCAGGGGTTTCTAATCGCTT | |
| | | CTCTGGCTCCAAGTCTGGCAACACGGCCTCCCTGACCATCTCTGGGCT | |
| | | CCAGGCTGAGGACGAGGCTGATTATTACTGCAGCTCATATGCAAGCA | |
| | | GCAGCACCCTTTGGGTGTTCGGCGGAGGGACCAAGCTGACCGTCCT | |
| S451- | HC-DNA | CAGGTGCAGCTGCAGGAGTCGGGCCCAGGACTGGTGAAGCCTTCGGA | 1825 |
| 650 | | GACCCTGTCCCTCACCTGCACTGTCTCTGGTGCCTCCATCAGTAATTTC | |
| | | TACTGGAGCTGGATCCGGCAGCCCCCAGGGAAGGGACTGGAGTGGAT | |
| | | TGGGTATATCTATTATAGTGGGAGCACCAACTACAACCCCTCCCTCAA | |
| | | GAGTCGAGTCACCATGTCACTAGACACGTCCAAGAACCAGTTCTCCCT | |
| | | GAATCTGAGCTCTGTGACCGCTGCGGACACGGCCGTGTATTACTGTGC | |
| | | GAGAATCCCCAATTTCTGGTTCGGGGAGTTATTATTTGACTTCTGGGG | |
| | | CCACGGAACGCTGGTCACCGTCTCCTCAG | |
| | LC-DNA | GAAATTGTGTTGACGCAGTCTCCAGGCACCCTGTCTTTGTCTCCAGGG | 1826 |
| | | GAAAGAGCCACCCTCTCCTGCAGGGCCAGTCAGAGTGTTAGCAGCAA | |
| | | CTACTTAGCCTGGTACCAGCAGAAACCTGGCCAGGCTCCCAGGCTCCT | |
| | | CATCTATGGTGCATCCAGCAGGGCCACTGGCATCCCAGACAGGTTCA | |
| | | GTGGCAGTGGGTCTGGGACAGACTTCACTCTCACCATCAGCAGACTG | |
| | | GAGCCTGAAGATTTTGCAGTGTATTACTGTCAGCAGTATGGTAGCTCA | |
| | | CCTCCGATCACCTTCGGCCAAGGGACACGACTGGAGATTAAAC | |
| S626- | HC-DNA | CAGGTCCAGCTGGTGCAGTCTGGGGCTGAGGTGAAGAAGCCTGGATC | 1811 |
| 362 | | CTCGGTGAAGGTCTCCTGCAAGGCTTCTGGAGGCACCTTCAGCAACTA | |
| | | TGCTATCAGCTGGGTGCGACAGGCCCCTGGACCAGGGCTTGAGTGGA | |
| | | TGGGAGGGATCATCCCTTTCCTTGGTATAGCAAACTACGCACAGAAG | |
| | | TTCCAGGGCAGAGTCACGATTACCGCGGACAAATCCACGAGCACAGC | |
| | | CTACATGGAGCTGAGCAGCCTGAGATCTGAGGACACGGCCGTGTATT | |
| | | ACTGTGCGAGGGCCCCCGGGTATAGTAGTGTAGGGTCGACAAACTAC | |
| | | TTCGACCCCTGGGGCCAGGGAACCCTGGTCACCGTCTCCTCAG | |
| | LC-DNA | CAGTCTGTGCTGACGCAGCCGCCCTCAGTGTCTGGGGCCCCAGGGCA | 1812 |
| | | GAGGGTCACCATCTCCTGCACTGGGAGCAGCTCCAACATCGGGGCAG | |
| | | GTTATGATGTACACTGGTACCAGCAACTTCCAGGAGCAGCCCCCAAA | |
| | | CTCCTCATCTATGCAAACAGCAATCGGCCCTCAGGGGTCCCTGACCGA | |
| | | TTCTCTGGCTCCAAGTCTGGCACCTCAGCCTCCCTGGCCATCACTGGG | |
| | | CTCCAGGCTGAGGATGAGGCTGATTATTACTGCCAGTCCTATGACAGC | |
| | | AGCCTGAGTGGTTATGTCTTCGGAACTGGGACCAAGGTCACCGTCCTA | |
| | | G | |
| S626- | HC-DNA | GAAGTGCAGCTGGTGGAGTCTGGGGGAGGCTTGGTACAGCCCGGCAG | 1817 |
| 651 | | GTCCCTGAGACTCTCCTGTGCAGCCTCTGGATTCACCTTTGATGATTTT | |
| | | GCCATGCACTGGGTCCGGCAAGCTCCAGGGAAGGGCCTGGAGTGGGT | |
| | | CTCAGGTATTAGTTGGAATGGTGGTATCATAGGCTATGCGGACTCTGT | |
| | | GAAGGCCCGATTCACCATCTCCAGAGACAACGCCAAGAACTCCCTGT | |
| | | ATCTGCAAATGAACAGTCTGAGAGCTGAGGACACGGCCTTGTATTAC | |
| | | TGTGCAAAGACCAGGGGGGATTATGATTACGTTTGGGGGAGCCGTTC | |
| | | TTCGAATTACTACTTTGACTACTGGGGCCAGGGAACCCTGGTCACGGT | |
| | | CTCCTCAG | |
| | LC-DNA | GACATCCAGATGACCCAGTCTCCATCCTCCCTGTCTGCATCTGTAGGA | 1818 |
| | | GACAGAGTCACCATCACTTGCCAGGCGAGTCAGGACATTAGCAACTA | |
| | | TTTAAATTGGTATCAGAAGAAACCAGGGAAAGCCCCTAAGCTCCTGA | |
| | | TCTACGATGCAACCAATTTGGAAACAGGGGTCCCATCAAGGTTCAGT | |
| | | GGAAGTGGATCTGGGACAGAGTTTACTTTCACCATCAGCAGCCTGCA | |
| | | GCCTGAAGATATTGCAACATATTATTGTCAACAGTATGATAATGTCCC | |
| | | TCCAATCACTTTCGGCCCTGGGACCAAAGTGGATATGAAAC | |
| S626- | HC-DNA | CAGGTGCAGCTGGTGCAGTCTGGGGCTGAGGTGAAGAAGCCTGGGGC | 1827 |
| 692 | | CTCAGTGAAGGTCTCCTGCAAGGCTTCTGGATACGCCTTCACCAGTTA | |
| | | TGATATCAACTGGGTGCGACAGGCCACTGGACAAGGGCTTGAGTGGA | |
| | | TGGGATGGATGAACCCTAACAGTGGTGACACATTCTATGCACAGAAG | |
| | | TTCCAGGGCAGAGTCACCATGACCAGGAGCACCTCCATAAGCACAGC | |
| | | CTACATGGAGCTGAGCAGCCTGAGATCTGAGGACACGGCCGTGTATT | |
| | | ACTGTGCGAGAGGGAGGGTAGGGGCGGATTATGTTTCGGGGAACCGT | |
| | | GGATACTACTACTACTACTACATGGACGTCTGGGGCAAAGGGACCAC | |
| | | GGTCACCGTCTCCTCA | |
| | LC-DNA | TCTTCTGAGCTGACTCAGGACCCTGCTGTGTCTGTGGCCTTGGGACAG | 1828 |
| | | ACAGTCAGGATCACATGCCAAGGAGAGAACCTCAGAAGCTACTATGC | |
| | | AACCTGGTACCAGCAGAAGCCAGGACAGGCCCCTATACTTGTCATCT | |
| | | ATGGTAAAAACAACCGGCCCTCAGGGATCCCAGACCGATTCTCTGGC | |
| | | TCCAGCTCAGGAAACACAGCTTCCTTGACCATCACTGGGGCTCAGGC | |
| | | GGAAGATGAGGCTGACTATTACTGTAACTCCCGGGACAGCAGTGGTA | |
| | | ACCATCTAAGGGTGTTCGGCGGAGGGACCAAGCTGACCGTCCTAG | |
| S626- | HC-DNA | CAGGTGCAGCTGGTGCAGTCTGGGGCTGAGGTGAAGAAGCCTGGGGC | 1827 |
| 7 | | CTCAGTGAAGGTCTCCTGCAAGGCTTCTGGATACGCCTTCACCAGTTA | |
| | | TGATATCAACTGGGTGCGACAGGCCACTGGACAAGGGCTTGAGTGGA | |
| | | TGGGATGGATGAACCCTAACAGTGGTGACACATTCTATGCACAGAAG | |
| | | TTCCAGGGCAGAGTCACCATGACCAGGAGCACCTCCATAAGCACAGC | |
| | | CTACATGGAGCTGAGCAGCCTGAGATCTGAGGACACGGCCGTGTATT | |
| | | ACTGTGCGAGAGGGAGGGTAGGGGCGGATTATGTTTCGGGGAACCGT | |
| | | GGATACTACTACTACTACTACATGGACGTCTGGGGCAAAGGGACCAC | |
| | | GGTCACCGTCTCCTCA | |
| | LC-DNA | TCTTCTGAGCTGACTCAGGACCCTGCTGTGTCTGTGGCCTTGGGACAG | 1828 |
| | | ACAGTCAGGATCACATGCCAAGGAGAGAACCTCAGAAGCTACTATGC | |
| | | AACCTGGTACCAGCAGAAGCCAGGACAGGCCCCTATACTTGTCATCT | |
| | | ATGGTAAAAACAACCGGCCCTCAGGGATCCCAGACCGATTCTCTGGC | |
| | | TCCAGCTCAGGAAACACAGCTTCCTTGACCATCACTGGGGCTCAGGC | |
| | | GGAAGATGAGGCTGACTATTACTGTAACTCCCGGGACAGCAGTGGTA | |
| | | ACCATCTAAGGGTGTTCGGCGGAGGGACCAAGCTGACCGTCCTAG | |
| S626- | HC-DNA | GAGCCGCAGCTGGTGGAATCTGGGGGAGGCTTGGTACAGCCGGGGGG | 1819 |
| 747 | | GTCCCTGAGACTCTCCTGTGCAGGCTCTGGATTCGGCTTCATATCTTA | |
| | | CCCCATGAACTGGGTCCGCCAGGCTCCAGGAAAGGGGCCGGAGTGGA | |
| | | TTTCAAATATTAGGACAACCGCTGAAGGTGGAACCTTTTACGCAGACT | |
| | | CTGTGAAGGGCCGATTCACCATGTCCAGAGACGACGGCAAGACTTCA | |
| | | ATATATCTTCAAATGAACAGCCTGAGAGACGAGGACACGGCTACATA | |
| | | TTACTGTGCGAGAGACTCTTCCTACGGATTTGATCTCTGGGGCCAGGG | |
| | | GACAGTGGTCACCGTCTCCTCAG | |
| | LC-DNA | CAGTCTGCCCTGACTCAGCCTCGCTCAGTGTCCGGGTCTCCTGGACAG | 1820 |
| | | TCAGTCACCATCTCCTGCACTGGAACCAGTAGTGATGTTGGTGGTTAT | |
| | | AACTATGTCTCCTGGTATCAACAACGCCCAGGGAAAGCCCCCGAATT | |
| | | GATGATTTATCATGTCAGTGAGCGGCCCTCAGGGGTCCCTGATCGCTT | |
| | | CTCTGGCTCCAAATCTGGCAACACGGCCTCCCTGACCATCTCTAGGCT | |
| | | CCAGGCTGAGGATGAGGCTGATTATTACTGCTGCTCATATGCAGGCA | |
| | | GCCACTTTTGGGTGTTCGGCGGAGGGACCAAGTTGACCGTCCTAG | |
| S626- | HC-DNA | CAGGTGCAACTGCAGGAGTCGGGCCCAGGACTGGTGAAGCCTTCACA | 1821 |
| 75 | | GACCCTGTCCCTCACCTGCACTGTCTCTGGTGGCTCCATCAGCAGTGG | |
| | | TGATTACTACTGGAGCTGGATCCGCCAGCCCCCAGGGAAGGGCCTGG | |
| | | AGTGGCTTGGGTACATCTATTACAGTGGGAGCACCTTCTACAACCCGT | |
| | | CCCTCAAGAGTCGAGTTACCATATCAGTAGACACGTCCAAGAACCAG | |
| | | TTCTCCCTGAGGCTGACCTCTGTGACTGCCGCAGACACGGCCGTGTAT | |
| | | TTCTGTGCCAGAGAGGAGAATAAATTCAACTATGGCCATCATCCCCTC | |
| | | AATGGAGTCTTTGCCTACTGGGGCCAGGGAACCCTGGTCACCGTCTCC | |
| | | TCAG | |
| | LC-DNA | GACATCGTGATGACCCAGTCTCCAGACTCCCTGGCTGTGTCTCTGGGC | 1822 |
| | | GAGAGGGCCACCATCAACTGCAAGTCCAGCCAGAGTGTTTTGTACAG | |
| | | CCCCAACAATAAGAACTACTTAGCTTGGTACCAGCAGAAACCAGGAC | |
| | | AGCCTCCTAACCTGCTCATCTACTGGGCATCTACCCGGGAATCCGGGG | |
| | | TCCCTGACCGATTCAGTGGCAGCGGGTCTGGGACAGATTTCACTCTCA | |
| | | CCATCAACAGCCTGCAGGCTGAAGATGTGGCAGTTTATTACTGTCAGC | |
| | | AATCTTATAATACTCCTCGGACGTTCGGCCAAGGGACCAAGGTGGAA | |
| | | ATCAAAC | |
| S626- | HC-DNA | CAGGTGCAGCTGGTGGAGTCTGGGGGAGGCGTGGTCCAGCCTGGGAG | 1829 |
| 8 | | GTCCCTGAGACTCTCCTGTGTATCCTCTGAAGTCACCTTCAATAGATA | |
| | | TACTATGCACTGGGTCCGCCAGGCTCCAGGCAAGGGGCTGGAGTGGG | |
| | | TGGCATCTATATCATTTGAAGGAAGTGTTAAAACCTATGTAGACTCCG | |
| | | TGAAGGGCCGATTCACCATCTCCAGAGACGATTCCAAGAAAACGCTG | |
| | | TTTCTGCAGTTGAACAGCCTGAGAGATGAGGACACGGCTATGTATTA | |
| | | CTGTGCGCGAGGTCAGTGGCCATCCGGGGGTGACTACTGGGGCCGGG | |
| | | GAACGCTGGTCACCGTCTCCTCAG | |
| | LC-DNA | GATGTTGTGCTGACTCAGTCTCCACTCTCCCTGTCCGTCACCCTTGGA | 1830 |
| | | CAGCCGGCCTCCATCTCCTGCAGGTCTAGTCAAAGCCTCGTTTACAGT | |
| | | GATGGAAGCACCTACTTGAATTGGTTTCATCAGAGGCCAGGCCAATC | |
| | | TCCAAGGCGCCTAATTTATAAGGTTTCTAACCGGGACTCTGGGGTCCC | |
| | | AGACAGATTCAGCGGCAGTGGGTCAGGCACTGATTTCACACTGAAAA | |
| | | TCACCAGGGTGGCGGCTGAGGATGTTGGGGTTTATTACTGCATGCAA | |
| | | GGTACATACTGGCCTCCGACGTTCGGCCAAGGGACCAAGGTGGAAAT | |
| | | CAAAC | |
| S68- | HC-DNA | GAGGTGCAGCTGGTGCAGTCTGGAGCAGAAATCAAAAAGCCGGGGG | 1831 |
| 253 | | AGTCTCTGAAGATCTCCTGCCAGGGTTCTGGATACATCTTTACCAACA | |
| | | ACTGGATCGGCTGGGTCCGCCAGCAGCCCGGCAAAGGACTGGAGTGG | |
| | | ATGGGCATCATCTATCCTGGTGACTCTGATGCCAGATATAGCCCGTCC | |
| | | TTCCAAGGCCACGTCAGCTTCTCTGCCGACAAGTCCATCAACACCGCC | |
| | | TTCCTGCAGTGGCACAGCCTGAAGGCCTCGGACACCGCCATGTATTAT | |
| | | TGTGCGAGAATCCGGAGAAGGGGACAGGGAGCTACTGCTGCTTTCGA | |
| | | TATCTGGGGCCCGGGGACAAAGGTCACCGTCTCTTCAG | |
| | LC-DNA | GACATCGTGATGACCCAGTCTCCAGACTCCCTGACTGTGTCTCTGGGC | 1832 |
| | | GAGAGGGCCACCATCAACTGCAAGTCCAGCCAGAATATTTTAACCAC | |
| | | CTCCAACAATAAGAATTACTTGGCTTGGTACCAACAAAAGCCAGGAC | |
| | | AGCCTCCTAAGCTGCTCATTTACTGGGCATCTACCCGGGAATCCGGGG | |
| | | TCCCTGACCGATTCAGTGGCAGCGGGTCTGGGACAGATTTCACTCTCA | |
| | | CCATCAGCAGCCTGCAGGCTGAAGATGTGGCAGTTTATTACTGTCAAC | |
| | | AATATTTTAATTCTCCTCCGTACACTTTTGGCCAGGGGACCAAGCTGG | |
| | | AGATCAAAC | |
| S728- | HC-DNA | CAGGTGCAGCTGGTGCAGTCTGGGGCTGAGGTGAAGAAGCCTGGGGC | 1833 |
| 1502 | | CTCAGTGAAGGTCTCCTGCAAGGCTTCTGGATACACCTTCACCGGCTA | |
| | | CTATATGCACTGGGTGCGACAGGCCCCTGGACAAGGGCTTGAGTGGA | |
| | | TGGGACGGATCAACCCTAACAGTGGTGGCACAAACTATGCACAGAAG | |
| | | TTTCAGGGCAGGGTCACCATGACCAGGGACACGTCCATCAGCACAGC | |
| | | CTACATGGAGCTGAGCAGGCTGAGATCTGACGACACGGCCGTGTATT | |
| | | ACTGTGCGAGAGCTCACCAGCCACTGCTGTACGGGTTGGGCTACTACT | |
| | | TTGACTACTGGGGCCAGGGAACCCTGGTCACCGTCTCCTCAG | |
| | LC-DNA | CAGTCTGCCCTGACTCAGCCTGCCTCCGTGTCTGGGTCTCCTGGACAG | 1834 |
| | | TCGATCACCATCTCCTGCACTGGAACCAGCAGTGACGTTGGTGGTTAT | |
| | | AACTATGTCTCCTGGTACCAACAGCACCCAGGCAAAGCCCCCAAACT | |
| | | CATGATTTATGAGGTCAGTAATCGGCCCTCAGGGGTTTCTAATCGCTT | |
| | | CTCTGGCTCCAAGTCTGGCAACACGGCCTCCCTGACCATCTCTGGGCT | |
| | | CCAGGCTGAGGACGAGGCTGATTATTACTGCAGCTCATATACAAGCA | |
| | | GCAGCACTCTGGTATTCGGCGGAGGGACCAAGCTGACCGTCCTAG | |
| S728- | HC-DNA | GAGGTGCAGCTGGTGGAGTCCGGGGGAGGCTTAGTTCAGCCTGGGGG | 1835 |
| 1789 | | GTCCCTGAGACTCTCCTGTGCAGCCTCTGGATTCACCTTCAGTAGCTA | |
| | | CTGGATGCACTGGGTCCGCCAAGCTCCAGGGAAGGGGCTGGTGTGGG | |
| | | TCTCACGTATTAATAGTGATGGGAGTAGCACAAGCTACGCGGACTCC | |
| | | GTGAAGGGCCGATTCACCATCTCCAGAGACAACGCCAAGAACACGCT | |
| | | GTATCTGCAAATGAACAGTCTGAGAGCCGAGGACACGGCTGTGTATT | |
| | | ACTGTGCAAGAGATCGGTATAGCAGCCTTGACTACTGGGGCCAGGGA | |
| | | ACCCTGGTCACCGTCTCCTCAG | |
| | LC-DNA | GAAATTGTGTTGACGCAGTCTCCAGGCACCCTGTCTTTGTCTCCAGGG | 1836 |
| | | GAAAGAGCCACCCTCTCCTGCAGGGCCAGTCAGAGTGTTAGCAGCAG | |
| | | CTACTTAGCCTGGTACCAGCAGAAACCTGGCCAGGCTCCCAGGCTCCT | |
| | | CATCTATGGTGCATCCAGCAGGGCCACTGGCATCCCAGACAGGTTCA | |
| | | GTGGCAGTGGGTCTGGGACAGACTTCACTCTCACCATCAGCAGACTG | |
| | | GAGCCTGAAGATTTTGCAGTGTATTACTGTCAGCAGTATGGTAGCTCA | |
| | | CCCGCGCTCACTTTCGGCGGAGGGACCAAGGTGGAGATCAAAC | |
| S728- | HC-DNA | CAGGTGCAGCTGGTGCAGTCTGGGGCTGAGGTGAAGAAGCCTGGGGC | 1833 |
| 1806 | | CTCAGTGAAGGTCTCCTGCAAGGCTTCTGGATACACCTTCACCGGCTA | |
| | | CTATATGCACTGGGTGCGACAGGCCCCTGGACAAGGGCTTGAGTGGA | |
| | | TGGGACGGATCAACCCTAACAGTGGTGGCACAAACTATGCACAGAAG | |
| | | TTTCAGGGCAGGGTCACCATGACCAGGGACACGTCCATCAGCACAGC | |
| | | CTACATGGAGCTGAGCAGGCTGAGATCTGACGACACGGCCGTGTATT | |
| | | ACTGTGCGAGAGCTCACCAGCCACTGCTGTACGGGTTGGGCTACTACT | |
| | | TTGACTACTGGGGCCAGGGAACCCTGGTCACCGTCTCCTCAG | |
| | LC-DNA | CAGTCTGCCCTGACTCAGCCTGCCTCCGTGTCTGGGTCTCCTGGACAG | 1834 |
| | | TCGATCACCATCTCCTGCACTGGAACCAGCAGTGACGTTGGTGGTTAT | |
| | | AACTATGTCTCCTGGTACCAACAGCACCCAGGCAAAGCCCCCAAACT | |
| | | CATGATTTATGAGGTCAGTAATCGGCCCTCAGGGGTTTCTAATCGCTT | |
| | | CTCTGGCTCCAAGTCTGGCAACACGGCCTCCCTGACCATCTCTGGGCT | |
| | | CCAGGCTGAGGACGAGGCTGATTATTACTGCAGCTCATATACAAGCA | |
| | | GCAGCACTCTGGTATTCGGCGGAGGGACCAAGCTGACCGTCCTAG | |
| S728- | HC-DNA | CAGGTGCAGCTGGTGCAGTCTGGGGCTGAGGTGAAGAAGCCTGGGGC | 1837 |
| 1981 | | CTCAGTGAAGGTTTCCTGCAAGACATCTGGATACACGTTCACCAACTA | |
| | | CTTTATGCACTGGGTGCGACAGGCCCCCGGACAAGGCCTTGAGTGGA | |
| | | TGGGAATAATCAACCCTAGTGGTGGTAGCGCAAGCTACGCACAGAAG | |
| | | TTCCAGGGCAGAATCACCATGACCAGCGACACGTCCACGAGCACAGT | |
| | | GTACATGGAACTGAGCAGCCTGAGATCTGAGGACACGGCCGTGTATT | |
| | | ATTGTGCGAGAGAGGATATTATCGTGGTGGTTCCTGCTAGGCCTCTTG | |
| | | ACTACTGGGGCCACGGAACCCTGGTCACCGTCTCCTC | |
| | LC-DNA | GAAATTGTGTTGACACAGTCTCCAGCCACCCTGTCTTTGTCTCCAGGG | 1838 |
| | | GAAAGAGCCACCCTCTCCTGCAGGGCCAGTCAGAGTTTTAGCAACTA | |
| | | CTTAGCCTGGTACCAACAGAAACCTGGCCAGGCTCCCAGGCTCCTCAT | |
| | | CTATGATGCATCCAACAGGGCCACTGGCATCCCAGCCAGGTTCAGTG | |
| | | GCAGTGGGTCTGGGACAGACTTCACTCTCACCATCAGCAGCCTAGAG | |
| | | CCTGAAGATTTTGCAGTTTATTACTGTCAGCAGCGTAGCAACTGGCCT | |
| | | CCGCTGCTCACTTTCGGCGGAGGGACCAAGGTTGAGATCAAAC | |
| S728- | HC-DNA | CAGGTGCACCTGGTGCAGTCTGGGGCTGAGATCAGGAAGCCTGGGGC | 1839 |
| 2036 | | CTCAGTGATGGTCTCCTGCAAGGCTTCTGGATACACCTTCACCGACTA | |
| | | CTATATACACTGGGTGCGACAGGCCCCTGGACAAGGGCTTGAGTGGA | |
| | | TGGGGTGGATCAACCCTAACAGTGGTGGCACAAACTATGCACAGAAA | |
| | | TTTCAGGGCAGGGTCACCATGACCAGGGACACGTCCATCAGAACAGC | |
| | | CTACATGGAACTGAGCAGGCTGAGATCTGACGACGCGGCCGTTTATT | |
| | | ACTGTGCGAGAGAAGGAATTTCAATGCTTCGGGGAGTTAGATCCTGG | |
| | | TTCGACCCCTGGGGCCAGGGAACCCTGGTCACCGTCTCCTCAG | |
| | LC-DNA | CAATCTGCCCTGACTCAGCCTGCCTCCGTGTCTGGGTCTCCTGGACAG | 1840 |
| | | TCGATCACCATCTCCTGCACTGGAACCAGCAGTGATGTTGGGAGTTAT | |
| | | AATCTTGTCTCCTGGTACCAACAGCACCCAGGCAAGGTCCCCAAACTC | |
| | | ATAATTTATGAGGTCACTAAGCGGCCCTCAGGGGTTTCTAATCGCTTC | |
| | | TCTGGCTCCAAGTCTGGCAACACGGCCTCCCTGACAATCTCTGGGCTC | |
| | | CAAACTGAGGACGAGGCTGATTATTACTGCTGCTCATATGCAGGTTTT | |
| | | AGCGCTTGGGTGTTCGGCGGAGGGACCAAACTGACCGTCCTAG | |
| S728- | HC-DNA | GAGGTGCAGCTGGTGGAGTCCGGGGGAGGCTTAGTTCAGCCTGGGGG | 1835 |
| 2111 | | GTCCCTGAGACTCTCCTGTGCAGCCTCTGGATTCACCTTCAGTAGCTA | |
| | | CTGGATGCACTGGGTCCGCCAAGCTCCAGGGAAGGGGCTGGTGTGGG | |
| | | TCTCACGTATTAATAGTGATGGGAGTAGCACAAGCTACGCGGACTCC | |
| | | GTGAAGGGCCGATTCACCATCTCCAGAGACAACGCCAAGAACACGCT | |
| | | GTATCTGCAAATGAACAGTCTGAGAGCCGAGGACACGGCTGTGTATT | |
| | | ACTGTGCAAGAGATCGGTATAGCAGCCTTGACTACTGGGGCCAGGGA | |
| | | ACCCTGGTCACCGTCTCCTCAG | |
| | LC-DNA | GAAATTGTGTTGACGCAGTCTCCAGGCACCCTGTCTTTGTCTCCAGGG | 1836 |
| | | GAAAGAGCCACCCTCTCCTGCAGGGCCAGTCAGAGTGTTAGCAGCAG | |
| | | CTACTTAGCCTGGTACCAGCAGAAACCTGGCCAGGCTCCCAGGCTCCT | |
| | | CATCTATGGTGCATCCAGCAGGGCCACTGGCATCCCAGACAGGTTCA | |
| | | GTGGCAGTGGGTCTGGGACAGACTTCACTCTCACCATCAGCAGACTG | |
| | | GAGCCTGAAGATTTTGCAGTGTATTACTGTCAGCAGTATGGTAGCTCA | |
| | | CCCGCGCTCACTTTCGGCGGAGGGACCAAGGTGGAGATCAAAC | |
| S728- | HC-DNA | CAGGTGCAGCTGGTGGAGTCTGGGGGAGGCGTGGTCCAGCCTGGGAG | 1797 |
| 2148 | | GTCCCTGAGACTCTCCTGTGCAGCGTCTGGATTCACCTTCAGTAGCTA | |
| | | TGGCATGCACTGGGTCCGCCAGGCTCCAGGCAAGGGGCTGGAGTGGG | |
| | | TGGCAGTTATATGGTATGATGGAAGTAATAAATACTATGCAGACTCC | |
| | | GTGAAGGGCCGATTCACCATCTCCAGAGACAATTCCAAGAACACGCT | |
| | | GTATCTGCAAATGAACAGCCTGAGAGCCGAGGACACGGCTGTGTATT | |
| | | ACTGTGCGAGAGCTCCTGACTACTGGGGCCAGGGAACCCTGGTCACC | |
| | | GTCTCCTCAG | |
| | LC-DNA | GCCATCCAGATGACCCAGTCTCCATCCTCCCTGTCTGCATCTGTAGGA | 1798 |
| | | GACAGAGTCACCATCACTTGCCGGGCAAGTCAGGGCATTAGAAATGA | |
| | | TTTAGGCTGGTATCAGCAGAAACCAGGGAAAGCCCCTAAGCTCCTGA | |
| | | TCTATGCTGCATCCAGTTTACAAAGTGGGGTCCCATCAAGGTTCAGCG | |
| | | GCAGTGGATCTGGCACAGATTTCACTCTCACCATCAGCAGCCTGCAGC | |
| | | CTGAAGATTTTGCAACTTATTACTGTCTACAAGATTACAATTACCCGT | |
| | | ACACTTTTGGCCAGGGGACCAAGCTGGAGATCAAAC | |
| S728- | HC-DNA | GAGGTGCAGCTGTTGGAGTCTGGGGGAGGCTTGGTACAGCCTGGGGG | 1841 |
| 656 | | GTCCCTGAGACTCTCATGTGCAGCCTCTGGATTCACCTTTAGTAGTTA | |
| | | TGTCTTGAGCTGGGTCCGCCAGGCTCCAGGGAAGGGGCTGGAATGGG | |
| | | TCTCAGCTATTAGTGGTAGTGGTGGTATCACATATTACGCAGACTCCG | |
| | | TGAAGGGCCGCTTCACCATCTCCAGAGACAATTCCAAGAACACACTG | |
| | | TATCTGCAAATGAACAGTCTGAGAGCCGAGGACACGGCCGTATATTA | |
| | | CTGTGCGATTCGAATTACGATTTCTGGAGTGTTTACTCCCGCTTGGGA | |
| | | CTCCTGGGGCCAGGGAACCCTGGTCACCGTCTCCTCAG | |
| | LC-DNA | GACATCCAGATGACCCAGTCTCCATCCTCCCTGTCTGCATCTGTAGGA | 1842 |
| | | GACAGAGTCACCATCACTTGCCGGGCAAGTCAGAGCATTAGCACCTA | |
| | | TTTAAATTGGTATCAGCAGAAACCAGGGAAAGCCCCTAAGCTCCTGA | |
| | | TCTATGCTGCATCCAGTTTGCAAAGTGGGGTCCCATCAAGGTTCAGTG | |
| | | GCAGTGGATCTGGGACAGATTTCACTCTCACCATCAGCAGTCTGCAAC | |
| | | CTGAAGATTTTGCAACTTACTTCTGTCAACAGAGTTACAGTTCCCCAT | |
| | | TCACTTTCGGCCCTGGGACCAAAGTGGATATCAAAC | |
| S728- | HC-DNA | CAGGTGCAGCTGGTGCAGTCTGGGGCTGAGGTGAAGAAGCCTGGGGC | 1837 |
| 723 | | CTCAGTGAAGGTTTCCTGCAAGACATCTGGATACACGTTCACCAACTA | |
| | | CTTTATGCACTGGGTGCGACAGGCCCCCGGACAAGGCCTTGAGTGGA | |
| | | TGGGAATAATCAACCCTAGTGGTGGTAGCGCAAGCTACGCACAGAAG | |
| | | TTCCAGGGCAGAATCACCATGACCAGCGACACGTCCACGAGCACAGT | |
| | | GTACATGGAACTGAGCAGCCTGAGATCTGAGGACACGGCCGTGTATT | |
| | | ATTGTGCGAGAGAGGATATTATCGTGGTGGTTCCTGCTAGGCCTCTTG | |
| | | ACTACTGGGGCCACGGAACCCTGGTCACCGTCTCCTC | |
| | LC-DNA | GAAATTGTGTTGACACAGTCTCCAGCCACCCTGTCTTTGTCTCCAGGG | 1838 |
| | | GAAAGAGCCACCCTCTCCTGCAGGGCCAGTCAGAGTTTTAGCAACTA | |
| | | CTTAGCCTGGTACCAACAGAAACCTGGCCAGGCTCCCAGGCTCCTCAT | |
| | | CTATGATGCATCCAACAGGGCCACTGGCATCCCAGCCAGGTTCAGTG | |
| | | GCAGTGGGTCTGGGACAGACTTCACTCTCACCATCAGCAGCCTAGAG | |
| | | CCTGAAGATTTTGCAGTTTATTACTGTCAGCAGCGTAGCAACTGGCCT | |
| | | CCGCTGCTCACTTTCGGCGGAGGGACCAAGGTTGAGATCAAAC | |
| S728- | HC-DNA | GAGGTGCAGCTGGTGGAGTCTGGGGGAGGCTTGGTCCAGCCTGGGGG | 1803 |
| 826 | | GTCCCTGAGACTCTCCTGTGCAGCCTCTGGATTCACCTTTGGTAGCTA | |
| | | TTGGATGAACTGGGTCCGCCAGGCTCCAGGGAAGGGGCTGGAGTGGG | |
| | | TGGCCAACATAAACGAAGATGGAAGTGAGAAATACTATGTGGACTCT | |
| | | GTGAAGGGCCGATTCACCATCTCCAGAGACAACGCCAAGAACTCACT | |
| | | ATATCTGCAAATGAACAGCCTGAGAGCCGAGGACACGGCTGTGTATT | |
| | | ACTGTGCGAGAGGACATTCTCTGGGTGAGTGGGGCCAGGGATCCCCG | |
| | | GTCACCGTCTCCTCAG | |
| | LC-DNA | TCTTCTGAGCTGACTCAGGACCCTGCTGTGTCTGTGGCCTTGGGACAG | 1804 |
| | | ACAGTCAGGATCACATGCCAAGGAGACAGCCTCAGAAGCTATTCTGC | |
| | | AAGCTGGTACCAGCAGAAGCCAGGACAGGCCCCTGTACTTGTCATCT | |
| | | ATATTAAAAACAAACGACCCTCAGGGATCCCAGACCGATTCTCTGGC | |
| | | TCCAGCTCAGGAAACACAGCTTCCTTGACCATCACTGGGGCTCAGGC | |
| | | GGAAGATGAGGCTGACTATTACTGTAACTCCCGGGACAGCAGTGGTG | |
| | | ACCATCTGGTGTTCGGCGGAGGGACCAAGCTGACCGTCCTAG | |
| S728- | HC-DNA | CAGGTGCACCTGGTGCAGTCTGGGGCTGAGATCAGGAAGCCTGGGGC | 1839 |
| 959 | | CTCAGTGATGGTCTCCTGCAAGGCTTCTGGATACACCTTCACCGACTA | |
| | | CTATATACACTGGGTGCGACAGGCCCCTGGACAAGGGCTTGAGTGGA | |
| | | TGGGGTGGATCAACCCTAACAGTGGTGGCACAAACTATGCACAGAAA | |
| | | TTTCAGGGCAGGGTCACCATGACCAGGGACACGTCCATCAGAACAGC | |
| | | CTACATGGAACTGAGCAGGCTGAGATCTGACGACGCGGCCGTTTATT | |
| | | ACTGTGCGAGAGAAGGAATTTCAATGCTTCGGGGAGTTAGATCCTGG | |
| | | TTCGACCCCTGGGGCCAGGGAACCCTGGTCACCGTCTCCTCAG | |
| | LC-DNA | CAATCTGCCCTGACTCAGCCTGCCTCCGTGTCTGGGTCTCCTGGACAG | 1840 |
| | | TCGATCACCATCTCCTGCACTGGAACCAGCAGTGATGTTGGGAGTTAT | |
| | | AATCTTGTCTCCTGGTACCAACAGCACCCAGGCAAGGTCCCCAAACTC | |
| | | ATAATTTATGAGGTCACTAAGCGGCCCTCAGGGGTTTCTAATCGCTTC | |
| | | TCTGGCTCCAAGTCTGGCAACACGGCCTCCCTGACAATCTCTGGGCTC | |
| | | CAAACTGAGGACGAGGCTGATTATTACTGCTGCTCATATGCAGGTTTT | |
| | | AGCGCTTGGGTGTTCGGCGGAGGGACCAAACTGACCGTCCTAG | |
| S210- | HC-DNA | CAGGTGCAGCTGGTGCAGTCTGGGGCTGAGGTGAAGAAGCCTGGGGC | 1843 |
| 530 | | CTCAGTGAAGGTCTCCTGCAAGGCTTCTGGATACACCTTCACCGGCTA | |
| | | CTTTATTCACTGGGTGCGACAGGCCCCTGGACAAGGGCTTGAATATAT | |
| | | GGGATGGATCAACCCTAATAGTGCTGGCACAAACTATGCACAGAAGT | |
| | | TTCAGGGCAGGGTCACCATGACCGGGGACACGTCCATCAGCACAGTC | |
| | | TACATGGAGCTGAGCAGGCTGAGATCTGACGACACGGCCATGTATTA | |
| | | CTGTGCGAGAGTATTTTTTGACTGGTTATTGCCGTTTGACTACTGGGG | |
| | | CCAGGGAACCCTGGTCACCGTCTCCTCAG | |
| | LC-DNA | CAGTCTGCCCTGACTCAGCCTGCCTCCGTGTCTGGGTCTCCTGGACAG | 1844 |
| | | TCGATCACCATCTCCTGCACTGGAACCAGCAGTGATGTTGGGAGTTAT | |
| | | AACCTTGTCTCCTGGTATCAACAGCACCCAGGCAAAGCCCCCAAACT | |
| | | CATGATTTATGAGGTCAGTAAGCGGCCCTCAGGGGTTTCTAATCGCTT | |
| | | CTCTGGCTCCAAGTCTGGCAACACGGCCTCCCTGACAATCTCTGGGCT | |
| | | CCAGGCTGAGGACGAGGCTGATTATTACTGCTGCTCATATGCAGGTA | |
| | | GTAATTATGTCTTCGGAACTGGGACCAAGGTCACCGTCCTAG | |
| S210- | HC-DNA | GAGGTGCAGCTGTTGGAGTCTGGGGGAGGCTTGGTACAGCCTGGGGG | 1845 |
| 1129 | | GTCCCTGAGACTCTCCTGTGTAGCCTCTAGATTCACCTTTAGCGACTA | |
| | | CGCCATGAGCTGGGTCCGCCAGCCTCCAGGGAAGGGGCTGGAGTGGG | |
| | | TCTCAAGTATTAGTGGTAGTGGTGGTATTACTTACTACGCAGACTCCG | |
| | | TGAAGGGCCGGTTCACCATCTCCAGAGACAATTCCAAGAACACACTG | |
| | | TATCTGCAAATAAAGAGCCTGAGAGCCGAGGACACGGCCATATATTA | |
| | | CTGTGCGAAGGAACGATCTAACTGGAACTACGTGGAAAACTTTGACT | |
| | | ACTGGGGCCAGGGAACCCTGGTCACCGTCTCCTCAG | |
| | LC-DNA | CAGACTGTGGTGACTCAGGAGCCCTCACTGACTGTGTCCCCAGGAGG | 1846 |
| | | GACAGTCACTCTCACCTGTGCTTCCAGTACTGGAACAGTCACCAGTGC | |
| | | TTTCTTTCCAAACTGGTTCCAGCAGAAACCTGGACAAGCACCCAGGG | |
| | | CACTGATTTATAGTACAACCAACAAATACTCCTGGACCCCTGCCCGGT | |
| | | TCTCAGGCTCCCTCCTTGGGGGCAAAGCTGCCCTGACACTGTCAGGTG | |
| | | TGCAGCCTGAGGACGAGGCTGACTATTACTGCCTGCTCTTCTATGGTG | |
| | | GTGCTCGGCCCCATGTGGTTTTCGGCGGAGGGACCAAGCTGACCGTC | |
| | | CTAG | |
| S451- | HC-DNA | CAGGTGCAGCTACAGCAGTGGGGCGCGGGACTGTTGAAGCCTTCGGA | 1847 |
| 5 | | GACCCTGTCCCTCACCTGCGCTGTCTATGGTGCGTCCGTCAGTGGTTA | |
| | | CTTCTGGAGCTGGATCCGCCAGCCCCCAGGGAAGGGGCTGGAGTGGA | |
| | | TTGGAGAAATCAATCGTTTTGGAAGCACCAACTACAACCCGTCCCTCA | |
| | | AGAGTCGAGTCACCTTATCAGTGGACACGTCCAGGAACCAGTTCTCC | |
| | | CTGAAGCTGGGCTCTGTGACCGCCGCGGACACGGCAATGTATTACTG | |
| | | TGCGAGAGGCAGTCAGGCCAACCCCCTCGTACGATTTTTTGACAGCCC | |
| | | CGTCACGGCTTTTGATATCTGGGGCCAAGGGACAATGGTCACCGTCTC | |
| | | TTCAG | |
| | LC-DNA | GAAATAGTGATGACGCAGTCTCCAGCCACCCTGTCTGTGTCTCCAGGG | 1848 |
| | | GAAAGGGCCACCCTCTCCTGCAGGGCCAGTCAGAGTATTAAGAGCAA | |
| | | CTTAGCCTGGTACCAACAAAAACCTGGCCAGGCTCCCAGGCTCCTCAT | |
| | | CTATGGTGCATCCACCAGGGCCACTGGTATCCCAGCCAGGTTCAGTG | |
| | | GCAGTGGGTCTGGGACAGAGTTCACTCTCACCATCAGCCGCCTGCAG | |
| | | TCTGAAGATTTTGCACTTTATTACTGTCAGCAGTATGATAACTGGCCT | |
| | | CCGTACACTTTTGGCCAGGGGACCAAGCTGGAGATCAAAC | |
| S451- | HC-DNA | CAGATCACCTTGAAGGAGTCTGGTCCTACGCTGGTGAAACCCACACA | 1849 |
| 506 | | GACCCTCACGCTGACCTGCACCTTCTCTGGGTTCTCATTCACCAGTAG | |
| | | TGGAGTGGGTGTGGGCTGGATCCGTCAGCCCCCAGGAAAGGCCATGG | |
| | | AGTGGCTTGCACTCATTTATTGGGATGATGATAAGCGTTACAGCCCAT | |
| | | CTCTGAAGAGCAGGCTCACCATCACCAAGGACACCTCCAAAAACCAG | |
| | | GTGGTCCTTAAAATGACCAATATGGACCCTGTGGACACAGCCACATA | |
| | | TTACTGTGCACGCCATACAGTGGCTACGATTGTTGACTACTGGGGCCA | |
| | | GGGAACCCTGGTCACCGTCTCCTCAG | |
| | LC-DNA | CAGTCTGCCCTGACTCAGCCTGCCTCCGTGTCTGGGTCTCCAGGACAG | 1850 |
| | | TCGATCACCATCTCCTGCACTGGAACCAGCAGTGACGTTGGTGGTTAT | |
| | | AACTATGTCTCCTGGTACCAACAACACCCAGGCAAAGCCCCCAAACT | |
| | | CATGATTTATGAGGTCAGTAATCGGCCCTCAGGGGTCCCTGATCGCTT | |
| | | CTCTGGCTCCAAGTCTGGCAACACGGCCTCCCTGACCATCTCTGGGCT | |
| | | CCAGGCTGAGGACGAGGCTGATTATTACTGCGGCTCATATACAACCA | |
| | | GCAGCACTCCTGTGGTTTTCGGCGGAGGGACCAAGCTGACCGTCCTA | |
| | | G | |
| S451- | HC-DNA | GAGGTGCAGCTGGTGGAGACTGGAGGAGGCTTGATCCAGCCTGGGGG | 1851 |
| 1140 | | GTCCCTGAGACTCTCCTGTGCAGCCTCTGGGATCACCGTCAGTAGCAA | |
| | | CTACATGAACTGGGTCCGCCTGGCTCCAGGGAAGGGGCTGGAGTGGG | |
| | | TCTCACTCATTTATAGCGGTGGTAGCACATTCTACGCAGACTCCGTGA | |
| | | AGGGCCGATTCACCATCTCCAGAGACAATTCCAAGAACACGCTGTAT | |
| | | CTTCAAATGAACAGCCTGAGAGCCGAGGACACGGCCGTGTATTATTG | |
| | | TGCGAGAGAAGGTTTAGTGGGAGCTACGACGGCTTTTGACTACTGGG | |
| | | GCCAGGGAACGCTGGTCACCGTCTCCTCAG | |
| | LC-DNA | GACATCCAGTTGACCCAGTCTCCATCCTTCCTGTCTGCATCTGTAGGA | 1852 |
| | | GACAGAGTCACCATCACTTGCCGGGCCAGTCAGGGCATTAGCAGTTA | |
| | | TTTAGCCTGGTATCAGCTACAACCAGGGAAAGCCCCTAAGCTCCTGAT | |
| | | CTATGCTGCATCCACTTTGCAAAGTGGGGTCCCATCAAGGTTCAGCGG | |
| | | CAGTGGATCTGGGACAGAATTCACTCTCACAATCAGCAGCCTGCAGC | |
| | | CTGAAGATTTTGCAACTTATTACTGTCAACAGCTTAATGGTCACCCCC | |
| | | AGGGGACGTTCGGCCAAGGGACCAAGGTGGAAATCAAAC | |
| S451- | HC-DNA | CAGGTCACCTTGAGGGAGTCTGGTCCTGCGCTGGTGAAACCCACACA | 1853 |
| 1190 | | GACCCTCACACTGACCTGCACCTTCTCTGGGTTCTCACTCACCACTAG | |
| | | TGGAATGTGTGTGAGCTGGATCCGTCAGCCCCCAGGGAAGGCCCTGG | |
| | | AGTGGCTTGCACGCATTGATTGGGATGATGATAAATACTACAGCACA | |
| | | TCTCTGAAGGCCAGGCTCACCATCTCCAAGGACACCTCCAAAAACCA | |
| | | GGTGGTCCTTACAATGACCAACATGGACCCTGTGGACACAGCCACGT | |
| | | ATTACTGTGCACGGACTTCAGTGGGAGGTACCAAGTACTACTTTGACT | |
| | | ACTGGGGCCAGGGAACGCTGGTCACCGTCTCCTCAG | |
| | LC-DNA | CAGTCTGTGCTGACTCAGCCACCCTCAGCGTCTGGGACCCCCGGGCA | 1854 |
| | | GAGGGTCACCATCTCTTGTTCTGGAAGCAGCTCCAACATCGGAAGAA | |
| | | ATACTGTAAACTGGTACCAGCAGCTCCCAGGAACGGCCCCCAAACTC | |
| | | CTCATCTATAGTAATAATCAGCGGCCCTCAGGGGTCCCTGACCGATTC | |
| | | TCTGGCTCCAAGTCTGGCACCTCAGCCTCCCTGGCCATCAGTGGGCTC | |
| | | CAGTCTGAGGATGAGGCTGATTATTACTGTGCAGCATGGGATGACAG | |
| | | CCTGAATGGGGGGGTATTCGGCGGAGGGACCAAGCTGACCGTCCTAG | |
| S626- | HC-DNA | CAGCTGCAGCTGCAGGAGTCGGGCCCAGGACTGGTGAAGCCTTCGGA | 1855 |
| 84 | | GGCCCTGTCCCTCACCTGCACTGTCTCTGGTGGCTCCATCAGCACTAG | |
| | | TAATTACTACTGGGGCTGGATCCGCCAGCCCCCAGGGAAGGGGCTGG | |
| | | AGTGGATTGGGAGTATCTATTATCGTGGGGGCACCCACTACAACCCG | |
| | | TCCCTCAAGACTCGAGTCACCATATCCGTAGACACGTCCAAGAACCA | |
| | | GTTCTCCCTGAAGCTGAGCTCTGTGACCGCCGCAGACACGGCTGTGTA | |
| | | TTACTGTGCGAGACATACCTATTTCTATGATATCGTGGGGGCAGCGGT | |
| | | TTGGGAACCTTTTGATATCTGGGGCCAAGGGACAATGGTCACCGTCTC | |
| | | TTCAG | |
| | LC-DNA | GAAATTGTGTTGACGCAGTCTCCAGGCACCCTGTCTTTGTCTCCAGGG | 1856 |
| | | GAAAGAGCCACCCTCTCCTGCAGGGCCAGTCAGAGTGTTAGCAGCAG | |
| | | CTACTTAGCCTGGTACCAGCAGAAACCTGGCCAGGCTCCCAGGCTCCT | |
| | | CATCTCTGATGCATCCAGCAGGGCCACTGGCATCCCAGACAGGTTCA | |
| | | GTGGCAGTGGGTCTGGGACAGACTTCACTCTCACCATCAGCAGACTG | |
| | | GAGCCTGAAGATTTTGCAGTGTATTACTGTCAGCAGTATGGTAGCTCA | |
| | | CCTCCGTGGACGTTCGGCCAAGGGACCAAGGTGGAAATCAAAC | |
| S626- | HC-DNA | CAGCTGCAGCTGCAGGAGTCGGGCCCAGGACTGGTGAAGCCTTCGGA | 1857 |
| 161 | | GACCCTGTCCCTCACCTGCACTGTCTCTGGTGGCTCCATCAGCAGTAA | |
| | | TAATTACTACTGGGGCTGGATCCGCCAGCCCCCAGGGAAGGGGCTGG | |
| | | AGTGGATTGGGAGTATCTATTATAGTGGCAGCACCTACTACAACCCGT | |
| | | CTCTCAAGAGTCGAGTCACCATGTCCGTAGACACGTCCAAGAACCAG | |
| | | TTCTCCCTGAAGCTGAGCTCTGTGACCGCCGCAGACACGGCTGTGTAT | |
| | | CACTGTGCGAGACAAGGACCGAATTACTATGATAGAAGTGGTTATTA | |
| | | TTACGTCGGCCCTTTTGATATCTGGGGCCAAGGGACAATGGTCACCGT | |
| | | CTCTTCAG | |
| | LC-DNA | CAGTCTGTGTTGACGCAGCCGCCCTCAGTGTCTGCGGCCCCAGGACA | 1858 |
| | | GAAGGTCACCATCTCCTGCTCTGGAAGCAGCTCCAACATTGGGAATA | |
| | | ATTCTGTATCCTGGTACCAGCACCTCCCAGGAACAGCCCCCAAACTCC | |
| | | TCATCTATGAAAATAATGAGCGACCCTCAGGGATTCCTGACCGATTCT | |
| | | CTGGCTCCAAGTCTGGCACGTCAGCCACCCTGGGCATCACCGGACTCC | |
| | | AGACTGGGGACGAGGCCGATTATTACTGCGAAACATGGGATAGGAGC | |
| | | CTGAGTGCTTCCTTCGGAACTGGGACCAAGGTCACCGTCCTAG | |
| S626- | HC-DNA | CAGGTGCAGCTGGTGCAGTCTGGGGCTGAGGTGAAGAAGCCTGGGGC | 1859 |
| 664 | | CTCAGTGAAGGTCTCCTGCAGGGTTTCTGGATACACCTTCACCGGCTA | |
| | | CTATATACACTGGGTGCGGCAGGCCCCTGGACAAGGGCTTGAGTGGA | |
| | | TGGGATGGATCAACCCTAACAGTGGTGGCACAAACTATGCACAGAAG | |
| | | TTTCAGGGCAGGGTCACCATGACCAGGGACACGTCCATCACCACAGC | |
| | | CTACATGGAGCTGAGCAGGCTGAGATCTGACGACACGGCCGTGTATT | |
| | | ACTGTGCGAGAGTCCCTATGATCCTAGTGGTTGATCATTGGGGTTCCT | |
| | | ACTTTGACTACTGGGGCCAGGGAACCCTGGTCACCGTCTCCTCAG | |
| | LC-DNA | CAGTCTGCCCTGACTCAGCCTGCCTCCGTGTCTGGGTCTCCTGGACAG | 1860 |
| | | TCGATCACCATCTCCTGCACTGGAACCAGCAGTGATGTTGGTGGTTAT | |
| | | AACTATGTCTCCTGGTACCAACAATACCCAGGCAAAGCCCCCAAACT | |
| | | CATGATTTATGATGTCAGTAAGCGGCCCTCAGGGGTTTCTAATCGCTT | |
| | | CTCTGGCTCCAAGTCTGGCAACACGGCCTCCCTGACAATCTCTGGGCT | |
| | | CCAGGCAGAGGACGAGGCTGATTATTACTGCTGCTCATATGCAGGTA | |
| | | GTAGCGCTTTAGTATTCGGCGGAGGGACCAAGCTGACCGTCCTAG | |
| S728- | HC-DNA | CAGATCACCTTGAAGGAGTCTGGTCCTACGCTGGTGAAACCCACACA | 1861 |
| 209 | | GACCCTCACACTGACCTGCACCCTCTCTGGATTCTCACTCAGCACTAG | |
| | | TGGAGTTAGTGTGGGCTGGATCCGTCAGCCCCCAGGAAAGGCCCTGG | |
| | | AATGGCTTGCAGTCATTTTTTGGGATGATGATAAGCGCTACAACCCAT | |
| | | CTCTGAAGAGCAGGCTCACCATCGCCAAGGACACCTCCAAAAGCCAG | |
| | | GTGGTCCTTACAATGACCAACCTGGACCCTGTGGACACTGGCACATAT | |
| | | TACTGTGTGTCGGGCAGCTCGTATTACTACTACTACTACATGGACGTC | |
| | | TGGGGCAAAGGGACCACGGTCACCGTCTCCTCA | |
| | LC-DNA | GACATCCAGATGACCCAGTCTCCATCTTCCGTGTCTGCATCTATTGGA | 1862 |
| | | GACAGAGTCACCATCACTTGTCGGGCGAGTCAGGATATTAGCACCTG | |
| | | GTTAGCCTGGTATCAGCAAAAACCAGGGAGAGCCCCTAACCTCCTGA | |
| | | TCTATGGTGCATCCAGCTTGCAAAGTGGGGTCCCATCAAGGTTCAGCG | |
| | | GCAGTGGATCTGGGACAGATTTCACTCTCACCATCAGCAGCCTGCAG | |
| | | CCTGAAGATTTTGCAACTTATTATTGTCAACAGGCTACCAGTTTCCCT | |
| | | CTCACTTTCGGCGGAGGGACCAAGGTCGAGATCAAAC | |
| S728- | HC-DNA | CAGGTGCAGCTGCAGGAGTCGGGCCCAGGACTGGTGAAGCCTTCACA | 1863 |
| 369 | | GACCCTGTCTCTCACCTGCTCTGTCTCTGGTGGCTCCATCAGCAGTGG | |
| | | TGGTTACTACTGGAGCTGGATCCGCCAGCACCCAGGGAAGGGCCTGG | |
| | | AGTGGATTGGGTACATGTATTACAGTGGGAGCACTTATTATAACCCGT | |
| | | CCCTCAAGAGTCGAGTTACCATATTCGTGGACACGTCTAAGAACCACT | |
| | | TCTCCCTGAAACTGACCTCTGTTACTGCCGCGGACACGGCCGTTTATT | |
| | | ACTGTGCGAGAGATTCGTACGAAAATTACTATGGTTCGGGGAGCCTG | |
| | | GAGCCCAACTACCACCACTACAATATGGACGTCTGGGGCCAAGGGAC | |
| | | CACGGTCACCGTCTCCTCA | |
| | LC-DNA | GACGTCCAGATGACCCAGTCTCCTTCCACCCTGTCTGCATCTATAGGA | 1864 |
| | | GACAGAGTCACCATCACTTGCCGGGCCAGTCAGAGTATTAGTGGCTG | |
| | | GTTGGCCTGGTATCAGCAGAGACCAGGGAAAGCCCCTAAACTCCTGA | |
| | | TCTATAGGGCGTCTAGTTTAGATTTTGGGGTCCCATCAAGGTTCAGCG | |
| | | GCAATGGATCTGGGACAGAATTCACTCTCACCATCAGCAGCCTGCAG | |
| | | CCTGATGATTTTGCAACTTATTACTGCCAACAGTATCATACTTATCGG | |
| | | ACGTTCGGCCAAGGGACCAAGGTGGAAGTCAAAC | |
| S728- | HC-DNA | GAGGTGCAGCTGGTGGAGTCTGGAGGAGGCTTGATCCAGCCTGGGGG | 1865 |
| 430 | | GTCCCTGAGACTCTCCTGTGCAGCCTCTGGGTTCACCGTCAGTAGCAA | |
| | | CTACATGAGCTGGGTCCGCCAGGCTCCAGGGAAGGGGCTGGAGTGGG | |
| | | TCTCAGTTATTTATAGCGGTGGTAGTACATACTACGCAGACTCCGTGA | |
| | | AGGGCCGATTCACCATCTCCAGAGACAATTCCAAGAACACGCTGTAT | |
| | | CTTCAAATGAACAGCCTGAGAGCCGAGGACACGGCCGTGTATTACTG | |
| | | TGCGAGAACCCCGAGGGGCAGCAGGCGGGGGGCTTTTGATATCTGGG | |
| | | GCCAAGGGACAATGGTCACCGTCTCTTCAG | |
| | LC-DNA | GACATCCAGATGACCCAGTCTCCATCCTCCCTGTCTGCATCTGTAGGA | 1866 |
| | | GACAGAGTCACCATCACTTGCCAGGCGAGTCAGGACATTAGCGACTA | |
| | | TTTAAATTGGTATCAGCAGAAACCAGGGAAAGCCCCTAAGCTCCTGA | |
| | | TCTACGATGCATCCAATTTGGAAACAGGGGTCCCATCAAGGTTCAGT | |
| | | GGAAGTGGATCTGGGACAGATTTTACTTTCACCATCAGCAGCCTGCA | |
| | | GCCTGAAGATATTGCAACATATTACTGTCAACAGTATGATAATCTCCC | |
| | | TCCGCTCACTTTCGGCGGAGGGACCAAGGTGGAGATCAAAC | |
| S728- | HC-DNA | CAGGTGCAGCTGGTGCAGTCTGGGGCTGAGGTGAAGAAGCCTGGGGC | 1867 |
| 537 | | CTCAGTGAAAGTCTCCTGTAAGACTTCTGGATACACCTTCACCGGCTT | |
| | | CTATTTGCACTGGCTGCGACAGGCCCCTGGACAAGGGCTTGAGTGGA | |
| | | TGGGACGAATCAACCCTAACACCGGTGACACAGACTATGCACAGAAG | |
| | | TTTCAGGGCAGGGTCACCATGACCAGGGACACCTCCATCAGCACAGC | |
| | | CTACATGGAACTGAGCAGGCTGAGAGCTGACGACACGGCCGTGTATT | |
| | | ATTGTGCGAGAACGCCCGGGCAAACACGACAACTGTTCGTGGGGACT | |
| | | AATGTTCTTGATGTCTGGGGCCAAGGGACAATGGTCACCGTCTCTTCA | |
| | | G | |
| | LC-DNA | GACATCCAGATGACCCAGTCTCCATCTTCCGTGTCTGCATCTGTAGGG | 1868 |
| | | GACAGAGTCACCATCACTTGTCGGGCGAGTCAGGGTATTAGCAGCTG | |
| | | GTTAGCCTGGTATCAACAGAAACCAGGGAAAGCCCCTAAGGTCCTCA | |
| | | TTTTTGCTGCATCCAGTTTGCAAAGTGGGGTCCCATCAAGGTTCAGCG | |
| | | GCAGTGGATCTGGGACAGATTTCACTCTCACCATCACCAGCCTGCAGC | |
| | | CTGAAGATTTTGCAACTTACTTTTGTCAACAGACTAACAGTTTCCCTC | |
| | | CCACTTTCGGCGGAGGGACCAAGGTGGAGATCAAAC | |
| S728- | HC-DNA | GAGGTGCAACTGGTGGAGTCTGGGGGAGGCTTGGTCCAGCCTGGGGG | 1869 |
| 1157 | | GTCCCTGAGACTCTCCTGTGCAGCCTCTGGATTACTCGTCAGTAGAAA | |
| | | TTACATGAACTGGGTCCGCCAGGCTCCAGGGAAGGGGCTGGAATGGG | |
| | | TCTCAATTATTTATAGTGGTGGCAGCACATTCTACGCAGACTCCGTGG | |
| | | AGGGCCGATTCACCATCTCCAGAGACGAGTCCAAGAACACACTGTAT | |
| | | CTTCAAATGAACAGTCTGAGAACTGACGACACGGCTGTGTATTACTGT | |
| | | GCGAGAGATCTCTCCGACTACGGTGGGATTGACTGCTGGGGCCAGGG | |
| | | AACCCTGGTCACCGTCTCCTCAG | |
| | LC-DNA | CCTATGAACTGACTCAGCCACTCTCAGTGTCAATGGCCCTGGGACAG | 1870 |
| | | ACGGCCAGGATTTCCTGTGGGGGAGACAACGTGGGAAGTCAAAATGT | |
| | | GCACTGGTACCAGCAGAGGCCAGGCCAGGCCCCTGTGCTGGTCATCT | |
| | | ATAGGGATAGCAACCGGCCCTCTGGGATCCCTGAGCGATTCTCTGGCT | |
| | | CCAAGTCGGGGAACACGGCCACCCTGACCATCAGCAGAGCCCAAGCC | |
| | | GGGGATGAGGCTGACTATTACTGTCAGGTGTGGGACAGCAGCACTGT | |
| | | GGCTTTCGGCGGAGGGACCAAGCTGACCGTCCTAG | |
| S728- | HC-DNA | CAGGTGCAGCTGCAGGAGTCGGGCCCAGGACTGGTGAAGCCTTCGGG | 1871 |
| 1261 | | GACCCTGTCCCTCACCTGCGCTGTCTCTGGTGGCTCCATCAGTAATAA | |
| | | TAACTGGTGGATTTGGGTCCGCCAGCCCCCAGGGAAGGGGCTGGAGT | |
| | | GGATTGGGGAAATCCATCATAGTGGGAGCACCGACTACAACCCGTCC | |
| | | CTCAAGAGTCGAGTCACCATATCAATAGACAAGTCCAAGAACCAGTT | |
| | | CTCCCTGAGGCTGAGCTCTGTGACCGCCGCGGACACGGCCGTGTATTA | |
| | | CTGTGCGAGAAAGCCAGAACCGTACTACTACTACTACTACATGGACG | |
| | | TCTGGGGCAAAGGGACCACGGTCACCGTCTCCTCA | |
| | LC-DNA | GAGACTGTGTTGACACAGTCTCCAGGCACCCTGTCTTTGTCTCCGGGG | 1872 |
| | | GAAAGAGCCACCCTCTCCTGCAGGGCCAGTCAGAGTGTTAGCAGCAG | |
| | | TTATATAACCTGGTACCAGCAGAAACCTGGCCAGGCTCCCAGGCTCCT | |
| | | CATCTATGGTGCATCCAGCAGGGCCACTGGCATCCCAGACAGGTTCA | |
| | | GTGGCAGTGGGTCTGGGACAGACTTCACTCTCACCATCAGTAGACTG | |
| | | GAGCCTGAAGATTTCGCAGTGTATTACTGTCAGCAATATCGTAGCCCC | |
| | | TGGGGGCTCACTTTCGGCCCTGGGACCAAAGTGGATATCAAAC | |
| S728- | HC-DNA | CAGGTCCAGCTGGTGCAGTCTGGGGCTGAGGTGGTGAAGCCTGGGTC | 1873 |
| 1690 | | CTCGGTGAAGGTCTCCTGCAAGGCCTCTGGAGGCACCTTCACCAGGT | |
| | | ACGCTATTAGCTGGGTGCGACAGGCCCCCGGACAAGGGCCTGAGTGG | |
| | | ATGGGAAGGATCATCCCTATGTTTGGAATAGCAAACTACGCACAGAG | |
| | | GTTCCAGGGCAGAGTCACGATGACCGCGGACAAATCCACGAGCACTG | |
| | | CCTACATGGAGCTGAGCAGCCTGAGATCTGAGGACACGGCCGTCTAT | |
| | | TACTGTGCGACATGCCAGTATTATTATGACAGTAGTGGTTATGGGTCC | |
| | | CTTGACTACTGGGGCCAGGGAACCCAGGTCACCGTCTCCTCAG | |
| | LC-DNA | GAAATTGTGTTGACGCAGTCTCCAGGCACCCTGTCTTTGTCTCCAGGG | 1874 |
| | | GAAAGAGTCACCCTCTCCTGCAGGGCCAGTCAGAGTATTAGCAGCAA | |
| | | CTTCTTAGCCTGGTACCAGCAGAAACCTGGCCAGGCTCCCAGGCTCCT | |
| | | CATCTCTGGTGCATCCAGCAGGGCCACTGGCATCCCAGACAGGTTCA | |
| | | GTGGCGGTGGGTCTGGGACAGACTTCACTCTCACCATCAGCAGACTG | |
| | | GAGCCTGAAGATTTTGCAGTGTATTACTGTCAGCAGTATCATAGCTCA | |
| | | CCGCGGACGTTCGGCCAAGGGACCAAGGTGGAAATCAAAC | |

TABLE 3
Summary of SEQ ID NOS.

| | | HC | | | | | | | | | LC | | | | | | | | | |
|---|---|---|---|---|---|---|---|---|---|---|---|---|---|---|---|---|---|---|---|---|
| | | vari- | HC | HCD | HC | HFR | HFR | HFR | HFR | | vari- | LCD | LCD | LCD | LFR | LFR | LFR | LFR | HC- | LC- |
| Clone | HC | able | DR1 | R2 | DR3 | 1 | 2 | 3 | 4 | LC | able | R1 | R2 | R3 | 1 | 2 | 3 | 4 | DNA | DNA |
| S20- | 1 | 2 | 3 | 4 | 5 | 6 | 7 | 8 | 9 | 10 | 11 | 12 | 13 | 14 | 15 | 16 | 17 | 18 | 1603 | 1604 |
| 15 | | | | | | | | | | | | | | | | | | | | |
| S20- | 19 | 20 | 21 | 22 | 23 | 24 | 25 | 26 | 9 | 27 | 28 | 29 | 30 | 31 | 32 | 33 | 34 | 35 | 1605 | 1606 |
| 22 | | | | | | | | | | | | | | | | | | | | |
| S20- | 36 | 37 | 38 | 39 | 40 | 41 | 42 | 43 | 44 | 45 | 46 | 47 | 48 | 49 | 50 | 51 | 52 | 53 | 1607 | 1608 |
| 31 | | | | | | | | | | | | | | | | | | | | |
| S20- | 54 | 55 | 56 | 57 | 58 | 24 | 25 | 59 | 60 | 61 | 62 | 63 | 64 | 65 | 66 | 67 | 68 | 69 | 1609 | 1610 |
| 40 | | | | | | | | | | | | | | | | | | | | |
| S20- | 70 | 71 | 72 | 73 | 74 | 75 | 7 | 76 | 60 | 77 | 78 | 79 | 80 | 81 | 82 | 83 | 84 | 85 | 1611 | 1612 |
| 58 | | | | | | | | | | | | | | | | | | | | |
| S20- | 86 | 87 | 3 | 88 | 89 | 24 | 90 | 91 | 44 | 92 | 93 | 63 | 94 | 95 | 96 | 67 | 97 | 69 | 1613 | 1614 |
| 74 | | | | | | | | | | | | | | | | | | | | |
| S20- | 98 | 99 | 100 | 101 | 102 | 103 | 104 | 105 | 106 | 107 | 108 | 63 | 64 | 65 | 66 | 67 | 68 | 18 | 1615 | 1616 |
| 86 | | | | | | | | | | | | | | | | | | | | |
| S24- | 109 | 110 | 56 | 111 | 112 | 113 | 114 | 115 | 60 | 116 | 117 | 118 | 119 | 120 | 121 | 122 | 123 | 69 | 1617 | 1618 |
| 68 | | | | | | | | | | | | | | | | | | | | |
| S24- | 124 | 125 | 126 | 127 | 128 | 129 | 130 | 131 | 60 | 132 | 133 | 134 | 135 | 136 | 50 | 137 | 138 | 53 | 1619 | 1620 |
| 105 | | | | | | | | | | | | | | | | | | | | |
| S24- | 139 | 140 | 141 | 142 | 143 | 144 | 145 | 146 | 147 | 148 | 149 | 150 | 151 | 152 | 66 | 153 | 68 | 18 | 1621 | 1622 |
| 178 | | | | | | | | | | | | | | | | | | | | |
| S24- | 154 | 155 | 156 | 157 | 158 | 159 | 160 | 161 | 147 | 162 | 163 | 63 | 164 | 165 | 66 | 67 | 166 | 167 | 1623 | 1624 |
| 188 | | | | | | | | | | | | | | | | | | | | |
| S24- | 168 | 169 | 170 | 171 | 172 | 173 | 174 | 175 | 147 | 176 | 177 | 178 | 179 | 180 | 181 | 182 | 183 | 184 | 1625 | 1626 |
| 202 | | | | | | | | | | | | | | | | | | | | |
| S24- | 185 | 186 | 187 | 188 | 189 | 190 | 160 | 191 | 147 | 192 | 193 | 194 | 135 | 195 | 50 | 182 | 196 | 85 | 1627 | 1628 |
| 278 | | | | | | | | | | | | | | | | | | | | |
| S24- | 197 | 198 | 199 | 200 | 201 | 202 | 203 | 204 | 60 | 205 | 206 | 207 | 208 | 209 | 210 | 182 | 211 | 53 | 1629 | 1630 |
| 339 | | | | | | | | | | | | | | | | | | | | |
| S24- | 212 | 213 | 214 | 215 | 216 | 217 | 218 | 219 | 220 | 221 | 222 | 223 | 224 | 225 | 226 | 227 | 228 | 69 | 1631 | 1632 |
| 472 | | | | | | | | | | | | | | | | | | | | |
| S24- | 229 | 230 | 231 | 232 | 233 | 190 | 160 | 234 | 60 | 235 | 236 | 237 | 135 | 238 | 50 | 239 | 196 | 85 | 1633 | 1634 |
| 490 | | | | | | | | | | | | | | | | | | | | |
| S24- | 240 | 241 | 242 | 243 | 244 | 245 | 7 | 115 | 9 | 246 | 247 | 248 | 249 | 250 | 251 | 252 | 253 | 85 | 1635 | 1636 |
| 494 | | | | | | | | | | | | | | | | | | | | |
| S24- | 254 | 255 | 199 | 256 | 257 | 258 | 203 | 259 | 60 | 260 | 261 | 262 | 263 | 264 | 265 | 266 | 267 | 53 | 1637 | 1638 |
| 566 | | | | | | | | | | | | | | | | | | | | |
| S24- | 268 | 269 | 270 | 271 | 272 | 129 | 145 | 273 | 60 | 274 | 275 | 276 | 277 | 278 | 279 | 280 | 281 | 69 | 1639 | 1640 |
| 636 | | | | | | | | | | | | | | | | | | | | |
| S24- | 282 | 283 | 284 | 285 | 286 | 190 | 287 | 288 | 60 | 289 | 290 | 291 | 30 | 292 | 32 | 33 | 293 | 85 | 1641 | 1642 |
| 740 | | | | | | | | | | | | | | | | | | | | |
| S24- | 294 | 295 | 296 | 297 | 298 | 24 | 7 | 299 | 44 | 300 | 301 | 302 | 135 | 303 | 304 | 182 | 305 | 53 | 1643 | 1644 |
| 791 | | | | | | | | | | | | | | | | | | | | |
| S24- | 306 | 307 | 308 | 157 | 309 | 310 | 160 | 161 | 147 | 311 | 312 | 313 | 314 | 315 | 316 | 317 | 318 | 69 | 1645 | 1646 |
| 902 | | | | | | | | | | | | | | | | | | | | |
| S24- | 319 | 320 | 321 | 322 | 323 | 324 | 7 | 325 | 44 | 326 | 327 | 328 | 249 | 329 | 330 | 252 | 253 | 53 | 1647 | 1648 |
| 921 | | | | | | | | | | | | | | | | | | | | |
| S24- | 331 | 332 | 56 | 333 | 334 | 24 | 7 | 335 | 60 | 336 | 337 | 338 | 135 | 303 | 50 | 182 | 339 | 53 | 1649 | 1650 |
| 1063 | | | | | | | | | | | | | | | | | | | | |
| S24- | 340 | 341 | 342 | 343 | 344 | 345 | 160 | 346 | 60 | 347 | 348 | 349 | 350 | 351 | 352 | 353 | 354 | 355 | 1651 | 1652 |
| 1224 | | | | | | | | | | | | | | | | | | | | |
| S24- | 356 | 357 | 358 | 359 | 360 | 361 | 130 | 362 | 60 | 363 | 364 | 365 | 366 | 367 | 368 | 369 | 370 | 69 | 1653 | 1654 |
| 1271 | | | | | | | | | | | | | | | | | | | | |
| S24- | 371 | 372 | 358 | 373 | 374 | 361 | 130 | 375 | 147 | 376 | 377 | 338 | 135 | 378 | 50 | 379 | 196 | 380 | 1655 | 1656 |
| 1339 | | | | | | | | | | | | | | | | | | | | |
| S24- | 381 | 382 | 242 | 243 | 383 | 245 | 7 | 115 | 60 | 384 | 385 | 386 | 387 | 388 | 389 | 252 | 253 | 85 | 1657 | 1658 |
| 1345 | | | | | | | | | | | | | | | | | | | | |
| S24- | 390 | 391 | 358 | 392 | 393 | 361 | 130 | 375 | 44 | 394 | 395 | 276 | 396 | 397 | 279 | 280 | 281 | 69 | 1659 | 1660 |
| 1378 | | | | | | | | | | | | | | | | | | | | |
| S24- | 398 | 399 | 56 | 4 | 400 | 24 | 7 | 115 | 147 | 401 | 402 | 403 | 404 | 405 | 121 | 122 | 406 | 69 | 1661 | 1662 |
| 1379 | | | | | | | | | | | | | | | | | | | | |
| S24- | 407 | 408 | 126 | 409 | 410 | 411 | 130 | 273 | 147 | 412 | 413 | 414 | 13 | 415 | 15 | 416 | 17 | 69 | 1663 | 1664 |
| 1384 | | | | | | | | | | | | | | | | | | | | |
| S24- | 417 | 418 | 199 | 419 | 420 | 202 | 203 | 259 | 421 | 422 | 423 | 207 | 208 | 424 | 210 | 182 | 211 | 53 | 1665 | 1666 |
| 1476 | | | | | | | | | | | | | | | | | | | | |
| S24- | 425 | 426 | 56 | 427 | 428 | 24 | 7 | 429 | 60 | 430 | 431 | 432 | 249 | 433 | 251 | 434 | 253 | 53 | 1667 | 1668 |
| 1564 | | | | | | | | | | | | | | | | | | | | |
| S24- | 435 | 436 | 437 | 142 | 438 | 144 | 145 | 146 | 60 | 439 | 440 | 178 | 441 | 442 | 181 | 182 | 183 | 443 | 1669 | 1670 |
| 1636 | | | | | | | | | | | | | | | | | | | | |
| S24- | 444 | 445 | 446 | 447 | 448 | 449 | 145 | 146 | 147 | 450 | 451 | 386 | 387 | 452 | 389 | 453 | 454 | 85 | 1671 | 1672 |
| 1002 | | | | | | | | | | | | | | | | | | | | |
| S24- | 455 | 456 | 457 | 458 | 459 | 460 | 42 | 461 | 60 | 462 | 463 | 464 | 465 | 466 | 467 | 468 | 469 | 69 | 1673 | 1674 |
| 1301 | | | | | | | | | | | | | | | | | | | | |
| S24- | 470 | 471 | 472 | 473 | 474 | 475 | 476 | 477 | 60 | 478 | 479 | 63 | 64 | 480 | 66 | 67 | 68 | 69 | 1675 | 1676 |
| 223 | | | | | | | | | | | | | | | | | | | | |
| S24- | 481 | 482 | 56 | 483 | 484 | 24 | 7 | 485 | 486 | 487 | 488 | 489 | 490 | 491 | 492 | 493 | 494 | 69 | 1677 | 1678 |
| 461 | | | | | | | | | | | | | | | | | | | | |
| S24- | 495 | 496 | 141 | 497 | 498 | 144 | 145 | 499 | 147 | 500 | 501 | 502 | 503 | 504 | 368 | 369 | 370 | 69 | 1679 | 1680 |
| 511 | | | | | | | | | | | | | | | | | | | | |
| S24- | 505 | 506 | 141 | 142 | 507 | 144 | 145 | 146 | 147 | 508 | 509 | 502 | 503 | 510 | 368 | 369 | 370 | 69 | 1681 | 1682 |
| 788 | | | | | | | | | | | | | | | | | | | | |
| S24- | 511 | 512 | 513 | 514 | 515 | 516 | 476 | 517 | 44 | 518 | 519 | 520 | 521 | 522 | 523 | 252 | 524 | 53 | 1683 | 1684 |
| 821 | | | | | | | | | | | | | | | | | | | | |
| S144- | 525 | 526 | 527 | 528 | 529 | 530 | 531 | 532 | 147 | 533 | 534 | 535 | 350 | 536 | 537 | 538 | 539 | 69 | 1685 | 1686 |
| 67 | | | | | | | | | | | | | | | | | | | | |
| S144- | 540 | 541 | 542 | 543 | 544 | 530 | 174 | 545 | 60 | 546 | 547 | 548 | 387 | 549 | 550 | 252 | 524 | 380 | 1687 | 1688 |
| 69 | | | | | | | | | | | | | | | | | | | | |
| S144- | 551 | 552 | 141 | 553 | 554 | 555 | 556 | 557 | 147 | 558 | 559 | 262 | 263 | 560 | 265 | 266 | 267 | 380 | 1689 | 1690 |
| 94 | | | | | | | | | | | | | | | | | | | | |
| S144- | 561 | 562 | 563 | 564 | 565 | 566 | 130 | 567 | 60 | 568 | 569 | 570 | 249 | 571 | 251 | 572 | 573 | 85 | 1691 | 1692 |
| 113 | | | | | | | | | | | | | | | | | | | | |
| S144- | 574 | 575 | 187 | 576 | 577 | 190 | 160 | 578 | 44 | 579 | 580 | 403 | 404 | 581 | 582 | 122 | 406 | 69 | 1693 | 1694 |
| 175 | | | | | | | | | | | | | | | | | | | | |
| S144- | 583 | 584 | 187 | 585 | 586 | 587 | 160 | 588 | 60 | 589 | 590 | 591 | 592 | 593 | 594 | 67 | 595 | 596 | 1695 | 1696 |
| 208 | | | | | | | | | | | | | | | | | | | | |
| S144- | 597 | 598 | 599 | 600 | 601 | 602 | 130 | 273 | 60 | 603 | 604 | 605 | 135 | 606 | 50 | 607 | 138 | 85 | 1697 | 1698 |
| 339 | | | | | | | | | | | | | | | | | | | | |
| S144- | 608 | 609 | 610 | 611 | 612 | 613 | 130 | 614 | 60 | 615 | 616 | 248 | 249 | 617 | 251 | 252 | 618 | 619 | 1699 | 1700 |
| 359 | | | | | | | | | | | | | | | | | | | | |
| S144- | 620 | 621 | 622 | 623 | 624 | 625 | 626 | 627 | 60 | 628 | 629 | 630 | 631 | 632 | 633 | 634 | 635 | 380 | 1701 | 1702 |
| 460 | | | | | | | | | | | | | | | | | | | | |
| S144- | 636 | 637 | 638 | 639 | 640 | 641 | 174 | 642 | 60 | 643 | 644 | 645 | 387 | 646 | 523 | 647 | 524 | 53 | 1703 | 1704 |
| 466 | | | | | | | | | | | | | | | | | | | | |
| S144- | 648 | 649 | 650 | 88 | 651 | 24 | 7 | 115 | 147 | 652 | 653 | 262 | 263 | 654 | 265 | 266 | 655 | 443 | 1705 | 1706 |
| 469 | | | | | | | | | | | | | | | | | | | | |
| S144- | 656 | 657 | 658 | 543 | 659 | 660 | 174 | 661 | 60 | 662 | 663 | 520 | 387 | 646 | 523 | 664 | 524 | 53 | 1707 | 1708 |
| 509 | | | | | | | | | | | | | | | | | | | | |
| S144- | 665 | 666 | 187 | 585 | 667 | 668 | 160 | 669 | 670 | 671 | 672 | 673 | 674 | 675 | 676 | 122 | 539 | 69 | 1709 | 1710 |
| 516 | | | | | | | | | | | | | | | | | | | | |
| S144- | 677 | 678 | 679 | 680 | 681 | 682 | 7 | 683 | 44 | 684 | 685 | 686 | 687 | 688 | 50 | 689 | 690 | 53 | 1711 | 1712 |
| 568 | | | | | | | | | | | | | | | | | | | | |
| S144- | 691 | 692 | 693 | 157 | 694 | 695 | 160 | 161 | 147 | 696 | 697 | 520 | 698 | 699 | 700 | 252 | 524 | 701 | 1713 | 1714 |
| 576 | | | | | | | | | | | | | | | | | | | | |
| S144- | 702 | 703 | 242 | 243 | 704 | 245 | 7 | 705 | 60 | 706 | 707 | 502 | 366 | 708 | 368 | 369 | 370 | 69 | 1715 | 1716 |
| 588 | | | | | | | | | | | | | | | | | | | | |
| S144- | 709 | 710 | 527 | 543 | 711 | 712 | 174 | 713 | 147 | 714 | 715 | 673 | 716 | 717 | 718 | 719 | 720 | 721 | 1717 | 1718 |
| 628 | | | | | | | | | | | | | | | | | | | | |
| S144- | 722 | 723 | 187 | 724 | 725 | 190 | 160 | 588 | 60 | 726 | 727 | 338 | 135 | 728 | 729 | 730 | 196 | 731 | 1719 | 1720 |
| 740 | | | | | | | | | | | | | | | | | | | | |
| S144- | 732 | 733 | 734 | 585 | 735 | 736 | 160 | 737 | 60 | 738 | 739 | 740 | 119 | 741 | 121 | 122 | 123 | 69 | 1721 | 1722 |
| 741 | | | | | | | | | | | | | | | | | | | | |
| S144- | 742 | 743 | 744 | 543 | 745 | 746 | 174 | 747 | 60 | 748 | 749 | 520 | 387 | 750 | 523 | 252 | 524 | 751 | 1723 | 1724 |
| 803 | | | | | | | | | | | | | | | | | | | | |
| S144- | 752 | 753 | 754 | 755 | 756 | 757 | 145 | 758 | 60 | 759 | 760 | 761 | 208 | 762 | 50 | 182 | 196 | 380 | 1725 | 1726 |
| 843 | | | | | | | | | | | | | | | | | | | | |
| S144- | 763 | 764 | 765 | 497 | 766 | 144 | 145 | 499 | 60 | 767 | 768 | 769 | 770 | 771 | 251 | 252 | 772 | 85 | 1727 | 1728 |
| 877 | | | | | | | | | | | | | | | | | | | | |
| S144- | 773 | 774 | 775 | 776 | 777 | 778 | 160 | 779 | 60 | 780 | 781 | 782 | 30 | 783 | 32 | 33 | 293 | 53 | 1729 | 1730 |
| 952 | | | | | | | | | | | | | | | | | | | | |
| S144- | 784 | 785 | 786 | 787 | 788 | 789 | 790 | 791 | 60 | 792 | 793 | 794 | 30 | 795 | 32 | 33 | 293 | 53 | 1731 | 1732 |
| 971 | | | | | | | | | | | | | | | | | | | | |
| S144- | 796 | 797 | 798 | 799 | 800 | 801 | 7 | 115 | 60 | 802 | 803 | 804 | 30 | 805 | 32 | 806 | 293 | 53 | 1733 | 1734 |
| 1036 | | | | | | | | | | | | | | | | | | | | |
| S144- | 807 | 808 | 693 | 809 | 810 | 811 | 160 | 812 | 813 | 814 | 815 | 816 | 135 | 817 | 50 | 182 | 818 | 380 | 1735 | 1736 |
| 1079 | | | | | | | | | | | | | | | | | | | | |
| S144- | 819 | 820 | 56 | 821 | 822 | 24 | 7 | 823 | 60 | 824 | 825 | 403 | 404 | 826 | 121 | 122 | 406 | 69 | 1737 | 1738 |
| 1299 | | | | | | | | | | | | | | | | | | | | |
| S144- | 827 | 828 | 829 | 830 | 831 | 832 | 160 | 833 | 834 | 835 | 836 | 837 | 64 | 838 | 66 | 839 | 68 | 69 | 1739 | 1740 |
| 1339 | | | | | | | | | | | | | | | | | | | | |
| S144- | 840 | 841 | 842 | 843 | 844 | 190 | 287 | 845 | 670 | 846 | 847 | 520 | 387 | 646 | 523 | 252 | 524 | 53 | 1741 | 1742 |
| 1406 | | | | | | | | | | | | | | | | | | | | |
| S144- | 848 | 849 | 850 | 851 | 852 | 310 | 160 | 853 | 44 | 854 | 855 | 520 | 387 | 856 | 523 | 252 | 857 | 380 | 1743 | 1744 |
| 1407 | | | | | | | | | | | | | | | | | | | | |
| S144- | 858 | 859 | 860 | 861 | 862 | 863 | 160 | 864 | 147 | 865 | 866 | 867 | 868 | 869 | 870 | 871 | 872 | 69 | 1745 | 1746 |
| 1569 | | | | | | | | | | | | | | | | | | | | |
| S144- | 873 | 874 | 542 | 875 | 876 | 877 | 174 | 878 | 60 | 879 | 880 | 881 | 387 | 882 | 883 | 252 | 884 | 885 | 1747 | 1748 |
| 1641 | | | | | | | | | | | | | | | | | | | | |
| S144- | 886 | 887 | 888 | 889 | 890 | 891 | 145 | 892 | 60 | 893 | 894 | 895 | 208 | 303 | 50 | 182 | 196 | 896 | 1749 | 1750 |
| 1827 | | | | | | | | | | | | | | | | | | | | |
| S144- | 897 | 898 | 126 | 899 | 900 | 602 | 130 | 901 | 44 | 902 | 903 | 904 | 905 | 906 | 121 | 122 | 406 | 907 | 1751 | 1752 |
| 1848 | | | | | | | | | | | | | | | | | | | | |
| S144- | 908 | 909 | 610 | 910 | 911 | 613 | 130 | 912 | 60 | 913 | 914 | 645 | 915 | 916 | 523 | 252 | 524 | 53 | 1753 | 1754 |
| 1850 | | | | | | | | | | | | | | | | | | | | |
| S144- | 917 | 918 | 919 | 920 | 921 | 310 | 160 | 161 | 60 | 922 | 923 | 291 | 30 | 924 | 925 | 33 | 926 | 53 | 1755 | 1756 |
| 2234 | | | | | | | | | | | | | | | | | | | | |
| S564- | 927 | 928 | 929 | 930 | 931 | 932 | 25 | 115 | 220 | 933 | 934 | 935 | 151 | 936 | 66 | 67 | 68 | 937 | 1757 | 1758 |
| 105 | | | | | | | | | | | | | | | | | | | | |
| S564- | 938 | 939 | 270 | 940 | 941 | 942 | 943 | 944 | 60 | 945 | 946 | 12 | 947 | 948 | 949 | 950 | 17 | 18 | 1759 | 1760 |
| 14 | | | | | | | | | | | | | | | | | | | | |
| S564- | 951 | 952 | 187 | 953 | 954 | 955 | 160 | 956 | 60 | 957 | 958 | 63 | 94 | 959 | 96 | 67 | 960 | 69 | 1761 | 1762 |
| 68 | | | | | | | | | | | | | | | | | | | | |
| S564- | 961 | 962 | 56 | 4 | 963 | 24 | 7 | 115 | 60 | 964 | 965 | 432 | 249 | 966 | 251 | 252 | 967 | 53 | 1763 | 1764 |
| 98 | | | | | | | | | | | | | | | | | | | | |
| S564- | 927 | 928 | 929 | 930 | 931 | 932 | 25 | 115 | 220 | 933 | 934 | 935 | 151 | 936 | 66 | 67 | 68 | 937 | 1757 | 1758 |
| 105 | | | | | | | | | | | | | | | | | | | | |
| S564- | 968 | 969 | 187 | 953 | 970 | 190 | 160 | 971 | 60 | 972 | 973 | 63 | 974 | 975 | 96 | 67 | 976 | 69 | 1765 | 1766 |
| 134 | | | | | | | | | | | | | | | | | | | | |
| S564- | 977 | 978 | 979 | 980 | 981 | 982 | 160 | 983 | 44 | 984 | 985 | 63 | 151 | 986 | 66 | 67 | 987 | 18 | 1767 | 1768 |
| 138 | | | | | | | | | | | | | | | | | | | | |
| S564- | 988 | 989 | 990 | 991 | 992 | 144 | 145 | 499 | 60 | 993 | 994 | 995 | 770 | 996 | 251 | 252 | 997 | 380 | 1769 | 1770 |
| 152 | | | | | | | | | | | | | | | | | | | | |
| S564- | 998 | 999 | 308 | 1000 | 1001 | 310 | 160 | 1002 | 44 | 1003 | 1004 | 63 | 94 | 1005 | 96 | 67 | 1006 | 69 | 1771 | 1772 |
| 218 | | | | | | | | | | | | | | | | | | | | |
| S564- | 1007 | 1008 | 1009 | 1010 | 1011 | 1012 | 1013 | 1014 | 60 | 1015 | 1016 | 1017 | 64 | 1018 | 66 | 1019 | 1020 | 69 | 1773 | 1774 |
| 249 | | | | | | | | | | | | | | | | | | | | |
| S564- | 1021 | 1022 | 187 | 1023 | 1024 | 190 | 160 | 1025 | 60 | 1026 | 1027 | 1028 | 94 | 1029 | 96 | 67 | 1006 | 721 | 1775 | 1776 |
| 265 | | | | | | | | | | | | | | | | | | | | |
| S564- | 1030 | 1031 | 56 | 333 | 1032 | 24 | 7 | 1033 | 60 | 1034 | 1035 | 1036 | 249 | 1037 | 1038 | 252 | 1039 | 85 | 1777 | 1778 |
| 275 | | | | | | | | | | | | | | | | | | | | |
| S564- | 1040 | 1041 | 187 | 953 | 1042 | 190 | 160 | 1043 | 60 | 1044 | 1045 | 63 | 64 | 1046 | 66 | 67 | 68 | 69 | 1779 | 1780 |
| 287 | | | | | | | | | | | | | | | | | | | | |
| S166- | 1047 | 1048 | 1049 | 1050 | 1051 | 1052 | 1053 | 1054 | 1055 | 1056 | 1057 | 1058 | 387 | 1059 | 523 | 252 | 524 | 53 | 1781 | 1782 |
| 32 | | | | | | | | | | | | | | | | | | | | |
| S305- | 1060 | 1061 | 1062 | 1063 | 1064 | 1065 | 145 | 1066 | 1067 | 1068 | 1069 | 1070 | 441 | 1071 | 181 | 1072 | 183 | 1073 | 1783 | 1784 |
| 223 | | | | | | | | | | | | | | | | | | | | |
| S305- | 1074 | 1075 | 457 | 458 | 1076 | 1077 | 42 | 1078 | 1079 | 1080 | 1081 | 1082 | 208 | 1083 | 210 | 182 | 1084 | 53 | 1785 | 1786 |
| 399 | | | | | | | | | | | | | | | | | | | | |
| S305- | 1085 | 1086 | 457 | 1087 | 1088 | 1077 | 42 | 1078 | 60 | 1089 | 1090 | 1091 | 208 | 1092 | 210 | 182 | 211 | 443 | 1787 | 1788 |
| 1456 | | | | | | | | | | | | | | | | | | | | |
| R125 | 1093 | 1094 | 1062 | 1095 | 1096 | 1097 | 145 | 1098 | 147 | 1099 | 1100 | 1101 | 1102 | 1103 | 1104 | 1105 | 1106 | 18 | 1789 | 1790 |
| -306 | | | | | | | | | | | | | | | | | | | | |
| R125 | 1107 | 1108 | 1109 | 4 | 1110 | 1111 | 7 | 1112 | 147 | 1113 | 1114 | 1115 | 1116 | 1117 | 1118 | 1119 | 1120 | 69 | 1791 | 1792 |
| -444 | | | | | | | | | | | | | | | | | | | | |
| R3- | 1121 | 1122 | 1123 | 1124 | 1125 | 1126 | 476 | 1127 | 60 | 1128 | 1129 | 1130 | 1131 | 1132 | 1133 | 1134 | 253 | 53 | 1793 | 1794 |
| 428 | | | | | | | | | | | | | | | | | | | | |
| R478 | 1135 | 1136 | 610 | 1137 | 1138 | 1139 | 130 | 499 | 60 | 1140 | 1141 | 1142 | 1143 | 1144 | 1145 | 1146 | 196 | 701 | 1795 | 1796 |
| 910- | | | | | | | | | | | | | | | | | | | | |
| 171 | | | | | | | | | | | | | | | | | | | | |
| R478 | 1147 | 1148 | 141 | 142 | 1149 | 144 | 145 | 146 | 60 | 1150 | 1151 | 1152 | 249 | 1153 | 1154 | 252 | 253 | 380 | 1797 | 1798 |
| 910- | | | | | | | | | | | | | | | | | | | | |
| 23 | | | | | | | | | | | | | | | | | | | | |
| R478 | 1155 | 1156 | 1157 | 1158 | 1159 | 1160 | 1161 | 1162 | 60 | 1163 | 1164 | 1165 | 1166 | 1167 | 251 | 453 | 1168 | 443 | 1799 | 1800 |
| 910- | | | | | | | | | | | | | | | | | | | | |
| 25 | | | | | | | | | | | | | | | | | | | | |
| R478 | 1169 | 1170 | 1171 | 1172 | 1173 | 1174 | 130 | 1175 | 1176 | 1177 | 1178 | 248 | 249 | 1179 | 1180 | 1181 | 253 | 85 | 1801 | 1802 |
| 910-3 | | | | | | | | | | | | | | | | | | | | |
| R478 | 1182 | 1183 | 1184 | 1185 | 1186 | 1187 | 145 | 273 | 1188 | 1189 | 1190 | 1191 | 1192 | 1193 | 1194 | 1195 | 1196 | 69 | 1803 | 1804 |
| 910- | | | | | | | | | | | | | | | | | | | | |
| 421 | | | | | | | | | | | | | | | | | | | | |
| R478 | 1197 | 1198 | 126 | 127 | 1199 | 613 | 130 | 273 | 9 | 1200 | 1201 | 338 | 135 | 1202 | 50 | 182 | 196 | 380 | 1805 | 1806 |
| 910-8 | | | | | | | | | | | | | | | | | | | | |
| S195- | 1203 | 1204 | 1205 | 1206 | 1207 | 144 | 145 | 1208 | 147 | 1209 | 1210 | 338 | 1211 | 1212 | 50 | 182 | 196 | 1213 | 1807 | 1808 |
| 637 | | | | | | | | | | | | | | | | | | | | |
| S380- | 1214 | 1215 | 1216 | 1217 | 1218 | 613 | 130 | 1219 | 60 | 1220 | 1221 | 673 | 350 | 1222 | 537 | 122 | 539 | 1223 | 1809 | 1810 |
| 1191 | | | | | | | | | | | | | | | | | | | | |
| S451- | 1224 | 1225 | 1226 | 1227 | 1228 | 310 | 1229 | 161 | 60 | 1230 | 1231 | 673 | 1232 | 1222 | 537 | 719 | 539 | 18 | 1811 | 1812 |
| 101 | | | | | | | | | | | | | | | | | | | | |
| S451- | 1233 | 1234 | 1235 | 1236 | 1237 | 1238 | 1239 | 1240 | 60 | 1241 | 1242 | 1243 | 592 | 1244 | 594 | 1245 | 1246 | 69 | 1813 | 1814 |
| 11 | | | | | | | | | | | | | | | | | | | | |
| S451- | 1247 | 1248 | 1249 | 1250 | 1251 | 324 | 25 | 1252 | 60 | 1253 | 1254 | 570 | 249 | 1255 | 251 | 252 | 253 | 53 | 1815 | 1816 |
| 1101 | | | | | | | | | | | | | | | | | | | | |
| S451- | 1256 | 1257 | 1258 | 1259 | 1260 | 1261 | 130 | 1262 | 60 | 1263 | 1264 | 769 | 1265 | 1266 | 251 | 1267 | 1268 | 1269 | 1817 | 1818 |
| 1439 | | | | | | | | | | | | | | | | | | | | |
| S451- | 1203 | 1204 | 1205 | 1206 | 1207 | 144 | 145 | 1208 | 147 | 1209 | 1210 | 338 | 1211 | 1212 | 50 | 182 | 196 | 1213 | 1807 | 1808 |
| 1451 | | | | | | | | | | | | | | | | | | | | |
| S451- | 1270 | 1271 | 1272 | 1273 | 1274 | 1275 | 1276 | 1277 | 421 | 1278 | 1279 | 63 | 1280 | 1281 | 594 | 1282 | 1283 | 69 | 1819 | 1820 |
| 1477 | | | | | | | | | | | | | | | | | | | | |
| S451- | 1182 | 1183 | 1184 | 1185 | 1186 | 1187 | 145 | 273 | 1188 | 1189 | 1190 | 1191 | 1192 | 1193 | 1194 | 1195 | 1196 | 69 | 1803 | 1804 |
| 1503 | | | | | | | | | | | | | | | | | | | | |
| S451- | 1214 | 1215 | 1216 | 1217 | 1218 | 613 | 130 | 1219 | 60 | 1220 | 1221 | 673 | 350 | 1222 | 537 | 122 | 539 | 1223 | 1809 | 1810 |
| 1522 | | | | | | | | | | | | | | | | | | | | |
| S451- | 1284 | 1285 | 72 | 1286 | 1287 | 1288 | 1289 | 1290 | 60 | 1291 | 1292 | 1293 | 30 | 1294 | 32 | 1295 | 1296 | 53 | 1821 | 1822 |
| 1921 | | | | | | | | | | | | | | | | | | | | |
| S451- | 1297 | 1298 | 1299 | 1300 | 1301 | 1302 | 476 | 1303 | 60 | 1304 | 1305 | 63 | 151 | 1306 | 1307 | 1308 | 68 | 69 | 1823 | 1824 |
| 337 | | | | | | | | | | | | | | | | | | | | |
| S451- | 1309 | 1310 | 1311 | 4 | 1312 | 1313 | 7 | 1314 | 1315 | 1316 | 1317 | 816 | 135 | 1318 | 50 | 182 | 196 | 701 | 1825 | 1826 |
| 650 | | | | | | | | | | | | | | | | | | | | |
| S626- | 1224 | 1225 | 1226 | 1227 | 1228 | 310 | 1229 | 161 | 60 | 1230 | 1231 | 673 | 1232 | 1222 | 537 | 719 | 539 | 18 | 1811 | 1812 |
| 362 | | | | | | | | | | | | | | | | | | | | |
| S626- | 1256 | 1257 | 1258 | 1259 | 1260 | 1261 | 130 | 1262 | 60 | 1263 | 1264 | 769 | 1265 | 1266 | 251 | 1267 | 1268 | 1269 | 1817 | 1818 |
| 651 | | | | | | | | | | | | | | | | | | | | |
| S626- | 1319 | 1320 | 1321 | 1322 | 1323 | 1324 | 1325 | 1326 | 670 | 1327 | 1328 | 1329 | 1330 | 1331 | 1194 | 1332 | 1196 | 69 | 1827 | 1828 |
| 692 | | | | | | | | | | | | | | | | | | | | |
| S626- | 1319 | 1320 | 1321 | 1322 | 1323 | 1324 | 1325 | 1326 | 670 | 1327 | 1328 | 1329 | 1330 | 1331 | 1194 | 1332 | 1196 | 69 | 1827 | 1828 |
| 7 | | | | | | | | | | | | | | | | | | | | |
| S626- | 1270 | 1271 | 1272 | 1273 | 1274 | 1275 | 1276 | 1277 | 421 | 1278 | 1279 | 63 | 1280 | 1281 | 594 | 1282 | 1283 | 69 | 1819 | 1820 |
| 747 | | | | | | | | | | | | | | | | | | | | |
| S626- | 1284 | 1285 | 72 | 1286 | 1287 | 1288 | 1289 | 1290 | 60 | 1291 | 1292 | 1293 | 30 | 1294 | 32 | 1295 | 1296 | 53 | 1821 | 1822 |
| 75 | | | | | | | | | | | | | | | | | | | | |
| S626- | 1333 | 1334 | 1335 | 1336 | 1337 | 1338 | 145 | 1339 | 9 | 1340 | 1341 | 1342 | 1343 | 1344 | 1345 | 1346 | 1347 | 53 | 1829 | 1830 |
| 8 | | | | | | | | | | | | | | | | | | | | |
| S68- | 1348 | 1349 | 1350 | 1351 | 1352 | 1353 | 1354 | 1355 | 1356 | 1357 | 1358 | 1359 | 30 | 1360 | 925 | 33 | 293 | 380 | 1831 | 1832 |
| 253 | | | | | | | | | | | | | | | | | | | | |
| S728- | 1361 | 1362 | 187 | 585 | 1363 | 190 | 160 | 588 | 60 | 1364 | 1365 | 63 | 151 | 1366 | 66 | 67 | 68 | 69 | 1833 | 1834 |
| 1502 | | | | | | | | | | | | | | | | | | | | |
| S728- | 1367 | 1368 | 1369 | 1370 | 1371 | 613 | 1372 | 1373 | 60 | 1374 | 1201 | 338 | 135 | 1375 | 50 | 182 | 196 | 85 | 1835 | 1836 |
| 1789 | | | | | | | | | | | | | | | | | | | | |
| S728- | 1361 | 1362 | 187 | 585 | 1363 | 190 | 160 | 588 | 60 | 1364 | 1365 | 63 | 151 | 1366 | 66 | 67 | 68 | 69 | 1833 | 1834 |
| 1806 | | | | | | | | | | | | | | | | | | | | |
| S728- | 1376 | 1377 | 1378 | 1379 | 1380 | 1381 | 160 | 1382 | 1315 | 1383 | 1384 | 1385 | 441 | 1386 | 181 | 182 | 183 | 85 | 1837 | 1838 |
| 1981 | | | | | | | | | | | | | | | | | | | | |
| S728- | 1387 | 1388 | 1389 | 953 | 1390 | 1391 | 160 | 1392 | 60 | 1393 | 1394 | 1395 | 1396 | 1397 | 66 | 1398 | 1399 | 69 | 1839 | 1840 |
| 2036 | | | | | | | | | | | | | | | | | | | | |
| S728- | 1367 | 1368 | 1369 | 1370 | 1371 | 613 | 1372 | 1373 | 60 | 1374 | 1201 | 338 | 135 | 1375 | 50 | 182 | 196 | 85 | 1835 | 1836 |
| 2111 | | | | | | | | | | | | | | | | | | | | |
| S728- | 1147 | 1148 | 141 | 142 | 1149 | 144 | 145 | 146 | 60 | 1150 | 1151 | 1152 | 249 | 1153 | 1154 | 252 | 253 | 380 | 1797 | 1798 |
| 2148 | | | | | | | | | | | | | | | | | | | | |
| S728- | 1400 | 1401 | 1402 | 1403 | 1404 | 566 | 130 | 1405 | 60 | 1406 | 1407 | 1036 | 249 | 1408 | 251 | 252 | 1409 | 443 | 1841 | 1842 |
| 656 | | | | | | | | | | | | | | | | | | | | |
| S728- | 1376 | 1377 | 1378 | 1379 | 1380 | 1381 | 160 | 1382 | 1315 | 1383 | 1384 | 1385 | 441 | 1386 | 181 | 182 | 183 | 85 | 1837 | 1838 |
| 723 | | | | | | | | | | | | | | | | | | | | |
| S728- | 1182 | 1183 | 1184 | 1185 | 1186 | 1187 | 145 | 273 | 1188 | 1189 | 1190 | 1191 | 1192 | 1193 | 1194 | 1195 | 1196 | 69 | 1803 | 1804 |
| 826 | | | | | | | | | | | | | | | | | | | | |
| S728- | 1387 | 1388 | 1389 | 953 | 1390 | 1391 | 160 | 1392 | 60 | 1393 | 1394 | 1395 | 1396 | 1397 | 66 | 1398 | 1399 | 69 | 1839 | 1840 |
| 959 | | | | | | | | | | | | | | | | | | | | |
| S210- | 1410 | 1411 | 1412 | 1413 | 1414 | 190 | 1415 | 1416 | 60 | 1417 | 1418 | 1395 | 94 | 1419 | 66 | 67 | 68 | 18 | 1843 | 1844 |
| 530 | | | | | | | | | | | | | | | | | | | | |
| S210- | 1420 | 1421 | 199 | 1422 | 1423 | 1424 | 104 | 1425 | 60 | 1426 | 1427 | 1428 | 1429 | 1430 | 1431 | 1432 | 1433 | 69 | 1845 | 1846 |
| 1129 | | | | | | | | | | | | | | | | | | | | |
| S451- | 1434 | 1435 | 798 | 1436 | 1437 | 1438 | 7 | 1439 | 44 | 1440 | 1441 | 1442 | 208 | 1443 | 210 | 182 | 1444 | 380 | 1847 | 1848 |
| 5 | | | | | | | | | | | | | | | | | | | | |
| S451- | 1445 | 1446 | 1447 | 473 | 1448 | 1449 | 1450 | 1451 | 60 | 1452 | 1453 | 63 | 151 | 1454 | 66 | 67 | 1246 | 69 | 1849 | 1850 |
| 506 | | | | | | | | | | | | | | | | | | | | |
| S451- | 1455 | 1456 | 1457 | 1458 | 1459 | 1460 | 1461 | 146 | 60 | 1462 | 1463 | 1464 | 1465 | 1466 | 1467 | 1468 | 1469 | 53 | 1851 | 1852 |
| 1140 | | | | | | | | | | | | | | | | | | | | |
| S451- | 1470 | 1471 | 1472 | 1473 | 1474 | 1475 | 476 | 517 | 60 | 1476 | 1477 | 1478 | 119 | 1479 | 121 | 122 | 123 | 69 | 1853 | 1854 |
| 1190 | | | | | | | | | | | | | | | | | | | | |
| S626- | 1480 | 1481 | 1482 | 1483 | 1484 | 1485 | 7 | 115 | 44 | 1486 | 1487 | 338 | 1143 | 1488 | 50 | 1489 | 196 | 53 | 1855 | 1856 |
| 84 | | | | | | | | | | | | | | | | | | | | |
| S626- | 1490 | 1491 | 1492 | 243 | 1493 | 245 | 7 | 1494 | 44 | 1495 | 1496 | 1497 | 1498 | 1499 | 1500 | 1501 | 1502 | 18 | 1857 | 1858 |
| 161 | | | | | | | | | | | | | | | | | | | | |
| S626- | 1503 | 1504 | 1505 | 953 | 1506 | 1507 | 160 | 1508 | 60 | 1509 | 1510 | 63 | 592 | 1511 | 66 | 1512 | 68 | 69 | 1859 | 1860 |
| 664 | | | | | | | | | | | | | | | | | | | | |
| S728- | 1513 | 1514 | 1515 | 1516 | 1517 | 1518 | 476 | 1519 | 670 | 1520 | 1521 | 1522 | 1523 | 1524 | 1525 | 1526 | 253 | 85 | 1861 | 1862 |
| 209 | | | | | | | | | | | | | | | | | | | | |
| S728- | 1527 | 1528 | 1235 | 1529 | 1530 | 1531 | 1239 | 1532 | 147 | 1533 | 1534 | 1535 | 1536 | 1537 | 1538 | 1181 | 1539 | 1540 | 1863 | 1864 |
| 369 | | | | | | | | | | | | | | | | | | | | |
| S728- | 1541 | 1542 | 358 | 392 | 1543 | 1544 | 130 | 146 | 44 | 1545 | 1546 | 1547 | 770 | 1548 | 251 | 252 | 997 | 85 | 1865 | 1866 |
| 430 | | | | | | | | | | | | | | | | | | | | |
| S728- | 1549 | 1550 | 1551 | 1552 | 1553 | 1381 | 1554 | 1555 | 44 | 1556 | 1557 | 1558 | 249 | 1559 | 1560 | 1561 | 1562 | 85 | 1867 | 1868 |
| 537 | | | | | | | | | | | | | | | | | | | | |
| S728- | 1563 | 1564 | 1565 | 1566 | 1567 | 1568 | 130 | 1569 | 60 | 1570 | 1571 | 1572 | 1573 | 1574 | 1575 | 950 | 1576 | 69 | 1869 | 1870 |
| 1157 | | | | | | | | | | | | | | | | | | | | |
| S728- | 1577 | 1578 | 1579 | 1580 | 1581 | 217 | 218 | 1582 | 670 | 1583 | 1584 | 1585 | 135 | 1586 | 1587 | 182 | 196 | 443 | 1871 | 1872 |
| 1261 | | | | | | | | | | | | | | | | | | | | |
| S728- | 1588 | 1589 | 1590 | 1591 | 1592 | 1593 | 1594 | 1595 | 1596 | 1597 | 1598 | 1599 | 135 | 1600 | 1601 | 1489 | 1602 | 53 | 1873 | 1874 |
| 1690 | | | | | | | | | | | | | | | | | | | | |

### 1. Variant Polypeptides

[0321] The following is a discussion of changing the amino acid subunits of a protein to create an equivalent, or even improved, second-generation variant polypeptide or peptide. For example, certain amino acids may be substituted for other amino acids in a protein or polypeptide sequence with or without appreciable loss of interactive binding capacity with structures such as, for example, antigen-binding regions of antibodies or binding sites on substrate molecules. Since it is the interactive capacity and nature of a protein that defines that protein's functional activity, certain amino acid substitutions can be made in a protein sequence and in its corresponding DNA coding sequence, and nevertheless produce a protein with similar or desirable properties. It is thus contemplated by the inventors that various changes may be made in the DNA sequences of genes which encode proteins without appreciable loss of their biological utility or activity.

[0322] The term “functionally equivalent codon” is used herein to refer to codons that encode the same amino acid, such as the six different codons for arginine. Also considered are “neutral substitutions” or “neutral mutations” which refers to a change in the codon or codons that encode biologically equivalent amino acids.

[0323] Amino acid sequence variants of the disclosure can be substitutional, insertional, or deletion variants. A variation in a polypeptide of the disclosure may affect 1, 2, 3, 4, 5, 6, 7, 8, 9, 10, 11, 12, 13, 14, 15, 16, 17, 18, 19, 20, 21, 22, 23, 24, 25, 26, 27, 28, 29, 30, 31, 32, 33, 34, 35, 36, 37, 38, 39, 40, 41, 42, 43, 44, 45, 46, 47, 48, 49, 50, or more non-contiguous or contiguous amino acids of the protein or polypeptide, as compared to wild-type. A variant can comprise an amino acid sequence that is at least 50%, 60%, 70%, 80%, or 90%, including all values and ranges there between, identical to any sequence provided or referenced herein. A variant can include 2, 3, 4, 5, 6, 7, 8, 9, 10, 11, 12, 13, 14, 15, 16, 17, 18, 19, 20, or more substitute amino acids.

[0324] It also will be understood that amino acid and nucleic acid sequences may include additional residues, such as additional N- or C-terminal amino acids, or 5′ or 3′ sequences, respectively, and yet still be essentially identical as set forth in one of the sequences disclosed herein, so long as the sequence meets the criteria set forth above, including the maintenance of biological protein activity where protein expression is concerned. The addition of terminal sequences particularly applies to nucleic acid sequences that may, for example, include various non-coding sequences flanking either of the 5′ or 3′ portions of the coding region.

[0325] Deletion variants typically lack one or more residues of the native or wild type protein. Individual residues can be deleted or a number of contiguous amino acids can be deleted. A stop codon may be introduced (by substitution or insertion) into an encoding nucleic acid sequence to generate a truncated protein.

[0326] Insertional mutants typically involve the addition of amino acid residues at a non-terminal point in the polypeptide. This may include the insertion of one or more amino acid residues. Terminal additions may also be generated and can include fusion proteins which are multimers or concatemers of one or more peptides or polypeptides described or referenced herein.

[0327] Substitutional variants typically contain the exchange of one amino acid for another at one or more sites within the protein or polypeptide, and may be designed to modulate one or more properties of the polypeptide, with or without the loss of other functions or properties. Substitutions may be conservative, that is, one amino acid is replaced with one of similar chemical properties. “Conservative amino acid substitutions” may involve exchange of a member of one amino acid class with another member of the same class. Conservative substitutions are well known in the art and include, for example, the changes of: alanine to serine; arginine to lysine; asparagine to glutamine or histidine; aspartate to glutamate; cysteine to serine; glutamine to asparagine; glutamate to aspartate; glycine to proline; histidine to asparagine or glutamine; isoleucine to leucine or valine; leucine to valine or isoleucine; lysine to arginine; methionine to leucine or isoleucine; phenylalanine to tyrosine, leucine or methionine; serine to threonine; threonine to serine; tryptophan to tyrosine; tyrosine to tryptophan or phenylalanine; and valine to isoleucine or leucine. Conservative amino acid substitutions may encompass non-naturally occurring amino acid residues, which are typically incorporated by chemical peptide synthesis rather than by synthesis in biological systems. These include peptidomimetics or other reversed or inverted forms of amino acid moieties.

[0328] Alternatively, substitutions may be “non-conservative”, such that a function or activity of the polypeptide is affected. Non-conservative changes typically involve substituting an amino acid residue with one that is chemically dissimilar, such as a polar or charged amino acid for a nonpolar or uncharged amino acid, and vice versa. Non-conservative substitutions may involve the exchange of a member of one of the amino acid classes for a member from another class.

### 2. Considerations for Substitutions

[0329] One skilled in the art can determine suitable variants of polypeptides as set forth herein using well-known techniques. One skilled in the art may identify suitable areas of the molecule that may be changed without destroying activity by targeting regions not believed to be important for activity. The skilled artisan will also be able to identify amino acid residues and portions of the molecules that are conserved among similar proteins or polypeptides. Areas that may be important for biological activity or for structure may be subject to conservative amino acid substitutions without significantly altering the biological activity or without adversely affecting the protein or polypeptide structure.

[0330] In making such changes, the hydropathy index of amino acids may be considered. The hydropathy profile of a protein is calculated by assigning each amino acid a numerical value (“hydropathy index”) and then repetitively averaging these values along the peptide chain. Each amino acid has been assigned a value based on its hydrophobicity and charge characteristics. They are: isoleucine (+4.5); valine (+4.2); leucine (+3.8); phenylalanine (+2.8); cysteine/cysteine (+2.5); methionine (+1.9); alanine (+1.8); glycine (−0.4); threonine (−0.7); serine (−0.8); tryptophan (−0.9); tyrosine (−1.3); proline (1.6); histidine (−3.2); glutamate (−3.5); glutamine (−3.5); aspartate (−3.5); asparagine (−3.5); lysine (−3.9); and arginine (−4.5). The importance of the hydropathy amino acid index in conferring interactive biologic function on a protein is generally understood in the art (Kyte et al., J. Mol. Biol. 157:105-131 (1982)). It is accepted that the relative hydropathic character of the amino acid contributes to the secondary structure of the resultant protein or polypeptide, which in turn defines the interaction of the protein or polypeptide with other molecules, for example, enzymes, substrates, receptors, DNA, antibodies, antigens, and others. It is also known that certain amino acids may be substituted for other amino acids having a similar hydropathy index or score, and still retain a similar biological activity. In making changes based upon the hydropathy index, the substitution of amino acids whose hydropathy indices are within ±2 is included. Those that are within ±1 may be included, or those within ±0.5 may be included.

[0331] It also is understood in the art that the substitution of like amino acids can be effectively made based on hydrophilicity. U.S. Pat. No. 4,554,101, incorporated herein by reference, states that the greatest local average hydrophilicity of a protein, as governed by the hydrophilicity of its adjacent amino acids, correlates with a biological property of the protein. The greatest local average hydrophilicity of a protein, as governed by the hydrophilicity of its adjacent amino acids, may correlate with its immunogenicity and antigen binding, that is, as a biological property of the protein. The following hydrophilicity values have been assigned to these amino acid residues: arginine (+3.0); lysine (+3.0); aspartate (+3.0±1); glutamate (+3.0±1); serine (+0.3); asparagine (+0.2); glutamine (+0.2); glycine (0); threonine (−0.4); proline (−0.5±1); alanine (−0.5); histidine (−0.5); cysteine (−1.0); methionine (−1.3); valine (−1.5); leucine (−1.8); isoleucine (−1.8); tyrosine (−2.3); phenylalanine (−2.5); and tryptophan (−3.4). In making changes based upon similar hydrophilicity values, the substitution of amino acids whose hydrophilicity values are within +2 may be included, or those which are within +1 may be included, or those within +0.5 may be included. In some instances, one may also identify epitopes from primary amino acid sequences based on hydrophilicity. These regions are also referred to as “epitopic core regions.” It is understood that an amino acid can be substituted for another having a similar hydrophilicity value and still produce a biologically equivalent and immunologically equivalent protein.

[0332] Additionally, one skilled in the art can review structure-function studies identifying residues in similar polypeptides or proteins that are important for activity or structure. In view of such a comparison, one can predict the importance of amino acid residues in a protein that correspond to amino acid residues important for activity or structure in similar proteins. One skilled in the art may opt for chemically similar amino acid substitutions for such predicted important amino acid residues.

[0333] One skilled in the art can also analyze the three-dimensional structure and amino acid sequence in relation to that structure in similar proteins or polypeptides. In view of such information, one skilled in the art may predict the alignment of amino acid residues of an antibody with respect to its three-dimensional structure. One skilled in the art may choose not to make changes to amino acid residues predicted to be on the surface of the protein, since such residues may be involved in important interactions with other molecules. Moreover, one skilled in the art may generate test variants containing a single amino acid substitution at each desired amino acid residue. These variants can then be screened using standard assays for binding and/or activity, thus yielding information gathered from such routine experiments, which may allow one skilled in the art to determine the amino acid positions where further substitutions should be avoided either alone or in combination with other mutations. Various tools available to determine secondary structure can be found on the world wide web at expasy.org/proteomics/protein_structure.

[0334] The amino acid substitutions may be made that: (1) reduce susceptibility to proteolysis, (2) reduce susceptibility to oxidation, (3) alter binding affinity for forming protein complexes, (4) alter ligand or antigen binding affinities, and/or (5) confer or modify other physicochemical or functional properties on such polypeptides. For example, single or multiple amino acid substitutions (e.g. conservative amino acid substitutions) may be made in the naturally occurring sequence. Substitutions can be made in that portion of the antibody that lies outside the domain(s) forming intermolecular contacts. Conservative amino acid substitutions can be used that do not substantially change the structural characteristics of the protein or polypeptide (e.g., one or more replacement amino acids that do not disrupt the secondary structure that characterizes the native antibody).

### VII. Nucleic Acids

[0335] Nucleic acid sequences can exist in a variety of instances such as: isolated segments and recombinant vectors of incorporated sequences or recombinant polynucleotides encoding peptides and polypeptides of the disclosure, or a fragment, derivative, mutein, or variant thereof, polynucleotides sufficient for use as hybridization probes, PCR primers or sequencing primers for identifying, analyzing, mutating or amplifying a polynucleotide encoding a polypeptide, anti-sense nucleic acids for inhibiting expression of a polynucleotide, and complementary sequences of the foregoing described herein. Nucleic acids encoding fusion proteins that include these peptides are also provided. The nucleic acids can be single-stranded or double-stranded and can comprise RNA and/or DNA nucleotides and artificial variants thereof (e.g., peptide nucleic acids).

[0336] The term “polynucleotide” refers to a nucleic acid molecule that either is recombinant or has been isolated from total genomic nucleic acid. Included within the term “polynucleotide” are oligonucleotides (nucleic acids 100 residues or less in length), recombinant vectors, including, for example, plasmids, cosmids, phage, viruses, and the like. Polynucleotides include regulatory sequences, isolated substantially away from their naturally occurring genes or protein encoding sequences. Polynucleotides may be single-stranded (coding or antisense) or double-stranded, and may be RNA, DNA (genomic, cDNA or synthetic), analogs thereof, or a combination thereof. Additional coding or non-coding sequences may, but need not, be present within a polynucleotide.

[0337] In this respect, the term “gene,” “polynucleotide,” or “nucleic acid” is used to refer to a nucleic acid that encodes a protein, polypeptide, or peptide (including any sequences required for proper transcription, post-translational modification, or localization). As will be understood by those in the art, this term encompasses genomic sequences, expression cassettes, cDNA sequences, and smaller engineered nucleic acid segments that express, or may be adapted to express, proteins, polypeptides, domains, peptides, fusion proteins, and mutants. A nucleic acid encoding all or part of a polypeptide may contain a contiguous nucleic acid sequence encoding all or a portion of such a polypeptide. It also is contemplated that a particular polypeptide may be encoded by nucleic acids containing variations having slightly different nucleic acid sequences but, nonetheless, encode the same or substantially similar protein.

[0338] Also included are polynucleotide variants having substantial identity to the sequences disclosed herein; those comprising at least 70%, 75%, 80%, 85%, 90%, 95%, 96%, 97%, 98%, or 99% or higher sequence identity, including all values and ranges there between, compared to a polynucleotide sequence provided herein using the methods described herein (e.g., BLAST analysis using standard parameters). The isolated polynucleotide may comprise a nucleotide sequence encoding a polypeptide that has at least 90%, preferably 95% and above, identity to an amino acid sequence described herein, over the entire length of the sequence; or a nucleotide sequence complementary to said isolated polynucleotide.

[0339] The nucleic acid segments, regardless of the length of the coding sequence itself, may be combined with other nucleic acid sequences, such as promoters, polyadenylation signals, additional restriction enzyme sites, multiple cloning sites, other coding segments, and the like, such that their overall length may vary considerably. The nucleic acids can be any length. They can be, for example, 5, 10, 15, 20, 25, 30, 35, 40, 45, 50, 75, 100, 125, 175, 200, 250, 300, 350, 400, 450, 500, 750, 1000, 1500, 3000, 5000 or more nucleotides in length, and/or can comprise one or more additional sequences, for example, regulatory sequences, and/or be a part of a larger nucleic acid, for example, a vector. It is therefore contemplated that a nucleic acid fragment of almost any length may be employed, with the total length preferably being limited by the ease of preparation and use in the intended recombinant nucleic acid protocol. In some cases, a nucleic acid sequence may encode a polypeptide sequence with additional heterologous coding sequences, for example to allow for purification of the polypeptide, transport, secretion, post-translational modification, or for therapeutic benefits such as targeting or efficacy. As discussed above, a tag or other heterologous polypeptide may be added to the modified polypeptide-encoding sequence, wherein “heterologous” refers to a polypeptide that is not the same as the modified polypeptide.

### A. Hybridization

[0340] The nucleic acids that hybridize to other nucleic acids under particular hybridization conditions. Methods for hybridizing nucleic acids are well known in the art. See, e.g., Current Protocols in Molecular Biology, John Wiley and Sons, N. Y. (1989), 6.3.1-6.3.6. As defined herein, a moderately stringent hybridization condition uses a prewashing solution containing 5× sodium chloride/sodium citrate (SSC), 0.5% SDS, 1.0 mM EDTA (pH 8.0), hybridization buffer of about 50% formamide, 6×SSC, and a hybridization temperature of 55° C. (or other similar hybridization solutions, such as one containing about 50% formamide, with a hybridization temperature of 42° C.), and washing conditions of 60° C. in 0.5×SSC, 0.1% SDS. A stringent hybridization condition hybridizes in 6×SSC at 45° C., followed by one or more washes in 0.1×SSC, 0.2% SDS at 68° C. Furthermore, one of skill in the art can manipulate the hybridization and/or washing conditions to increase or decrease the stringency of hybridization such that nucleic acids comprising nucleotide sequence that are at least 65%, at least 70%, at least 75%, at least 80%, at least 85%, at least 90%, at least 95%, at least 96%, at least 97%, at least 98% or at least 99% identical to each other typically remain hybridized to each other.

[0341] The parameters affecting the choice of hybridization conditions and guidance for devising suitable conditions are set forth by, for example, Sambrook, Fritsch, and Maniatis (Molecular Cloning: A Laboratory Manual, Cold Spring Harbor Laboratory Press, Cold Spring Harbor, N.Y., chapters 9 and 11 (1989); Current Protocols in Molecular Biology, Ausubel et al., eds., John Wiley and Sons, Inc., sections 2.10 and 6.3-6.4 (1995), both of which are herein incorporated by reference in their entirety for all purposes) and can be readily determined by those having ordinary skill in the art based on, for example, the length and/or base composition of the DNA.

### B. Mutation

[0342] Changes can be introduced by mutation into a nucleic acid, thereby leading to changes in the amino acid sequence of a polypeptide (e.g., an antigenic peptide or polypeptide) that it encodes. Mutations can be introduced using any technique known in the art. One or more particular amino acid residues may be changed using, for example, a site-directed mutagenesis protocol. One or more randomly selected residues may be changed using, for example, a random mutagenesis protocol. However it is made, a mutant polypeptide can be expressed and screened for a desired property.

[0343] Mutations can be introduced into a nucleic acid without significantly altering the biological activity of a polypeptide that it encodes. For example, one can make nucleotide substitutions leading to amino acid substitutions at non-essential amino acid residues. Alternatively, one or more mutations can be introduced into a nucleic acid that selectively changes the biological activity of a polypeptide that it encodes. See, eg., Romain Studer et al., Biochem. J. 449:581-594 (2013). For example, the mutation can quantitatively or qualitatively change the biological activity. Examples of quantitative changes include increasing, reducing or eliminating the activity. Examples of qualitative changes include altering the antigen specificity of an antibody.

### C. Probes

[0344] Nucleic acid molecules may be suitable for use as primers or hybridization probes for the detection of nucleic acid sequences. A nucleic acid molecule can comprise only a portion of a nucleic acid sequence encoding a full-length polypeptide, for example, a fragment that can be used as a probe or primer or a fragment encoding an active portion of a given polypeptide.

[0345] The nucleic acid molecules may be used as probes or PCR primers for specific nucleic acid sequences. For instance, a nucleic acid molecule probe may be used in diagnostic methods or a nucleic acid molecule PCR primer may be used to amplify regions of DNA that could be used, inter alia, to isolate nucleic acid sequences for use in producing the engineered cells of the disclosure. The nucleic acid molecules may be further defined as oligonucleotides.

[0346] Probes based on the desired sequence of a nucleic acid can be used to detect the nucleic acid or similar nucleic acids, for example, transcripts encoding a polypeptide of interest. The probe can comprise a label group, e.g., a radioisotope, a fluorescent compound, an enzyme, or an enzyme co-factor. Such probes can be used to identify a cell that expresses the polypeptide.

### VIII. Polypeptide Expression

[0347] Also provided are nucleic acid molecule encoding polypeptides, antibodies, or antigen binding fragments of the disclosure. The nucleic acid molecules may be used to express large quantities of polypeptides. If the nucleic acid molecules are derived from a non-human, non-transgenic animal, the nucleic acid molecules may be used for humanization of the antibody or TCR genes.

### A. Vectors

[0348] Contemplated are expression vectors comprising a nucleic acid molecule encoding a polypeptide of the desired sequence or a portion thereof (e.g., a fragment containing one or more CDRs or one or more variable region domains). Expression vectors comprising the nucleic acid molecules may encode the heavy chain, light chain, or the antigen-binding portion thereof. Also provided are expression vectors comprising nucleic acid molecules may encode fusion proteins, modified antibodies, antibody heavy and/or light chain, antibody fragments, and probes thereof. In addition to control sequences that govern transcription and translation, vectors and expression vectors may contain nucleic acid sequences that serve other functions as well.

[0349] To express the polypeptides or peptides of the disclosure, DNAs encoding the polypeptides or peptides are inserted into expression vectors such that the gene area is operatively linked to transcriptional and translational control sequences. A vector that encodes a functionally complete human CH or CL immunoglobulin sequence with appropriate restriction sites may be engineered so that any VH or VL sequence can be easily inserted and expressed. A vector that encodes a functionally complete human TCR alpha or TCR beta sequence with appropriate restriction sites may be engineered so that any variable sequence or CDR1, CDR2, and/or CDR3 can be easily inserted and expressed. Typically, expression vectors used in any of the host cells contain sequences for plasmid or virus maintenance and for cloning and expression of exogenous nucleotide sequences. Such sequences, collectively referred to as “flanking sequences” typically include one or more of the following operatively linked nucleotide sequences: a promoter, one or more enhancer sequences, an origin of replication, a transcriptional termination sequence, a complete intron sequence containing a donor and acceptor splice site, a sequence encoding a leader sequence for polypeptide secretion, a ribosome binding site, a polyadenylation sequence, a polylinker region for inserting the nucleic acid encoding the polypeptide to be expressed, and a selectable marker element. Such sequences and methods of using the same are well known in the art.

### B. Expression Systems

[0350] Numerous expression systems exist that comprise at least a part or all of the expression vectors discussed above. Prokaryote- and/or eukaryote-based systems can be employed to produce nucleic acid sequences, or their cognate polypeptides, proteins and peptides. Commercially and widely available systems include in but are not limited to bacterial, mammalian, yeast, and insect cell systems. Different host cells have characteristic and specific mechanisms for the post-translational processing and modification of proteins. Appropriate cell lines or host systems can be chosen to ensure the correct modification and processing of the foreign protein expressed. Those skilled in the art are able to express a vector to produce a nucleic acid sequence or its cognate polypeptide, protein, or peptide using an appropriate expression system.

### C. Methods of Gene Transfer

[0351] Suitable methods for nucleic acid delivery to effect expression of compositions are anticipated to include virtually any method by which a nucleic acid (e.g., DNA, including viral and nonviral vectors) can be introduced into a cell, a tissue or an organism, as described herein or as would be known to one of ordinary skill in the art. Such methods include, but are not limited to, direct delivery of DNA such as by injection (U.S. Pat. No. 5,994,624, 5,981,274, 5,945,100, 5,780,448, 5,736,524, 5,702,932, 5,656,610, 5,589,466 and 5,580,859, each incorporated herein by reference), including microinjection (Harland and Weintraub, 1985; U.S. Pat. No. 5,789,215, incorporated herein by reference); by electroporation (U.S. Pat. No. 5,384,253, incorporated herein by reference); by calcium phosphate precipitation (Graham and Van Der Eb, 1973; Chen and Okayama, 1987; Rippe et al., 1990); by using DEAE dextran followed by polyethylene glycol (Gopal, 1985); by direct sonic loading (Fechheimer et al., 1987); by liposome mediated transfection (Nicolau and Sene, 1982; Fraley et al., 1979; Nicolau et al., 1987; Wong et al., 1980; Kaneda et al., 1989; Kato et al., 1991); by microprojectile bombardment (PCT Application Nos. WO 94/09699 and 95/06128; U.S. Pat. Nos. 5,610,042; 5,322,783, 5,563,055, 5,550,318, 5,538,877 and 5,538,880, and each incorporated herein by reference); by agitation with silicon carbide fibers (Kaeppler et al., 1990; U.S. Pat. Nos. 5,302,523 and 5,464,765, each incorporated herein by reference); by Agrobacterium mediated transformation (U.S. Pat. Nos. 5,591,616 and 5,563,055, each incorporated herein by reference); or by PEG mediated transformation of protoplasts (Omirulleh et al., 1993; U.S. Pat. Nos. 4,684,611 and 4,952,500, each incorporated herein by reference); by desiccation/inhibition mediated DNA uptake (Potrykus et al., 1985). Other methods include viral transduction, such as gene transfer by lentiviral or retroviral transduction.

### IX. Pharmaceutical Compositions

[0352] The present disclosure includes methods for treating disease and modulating immune responses in a subject in need thereof. The disclosure includes cells that may be in the form of a pharmaceutical composition that can be used to induce or modify an immune response.

[0353] Administration of the compositions according to the current disclosure will typically be via any common route. This includes, but is not limited to parenteral, orthotopic, intradermal, subcutaneous, orally, transdermally, intramuscular, intraperitoneal, intraperitoneally, intraorbitally, by implantation, by inhalation, intraventricularly, intranasally or intravenous injection. Compositions of the present disclosure (e.g., compositions comprising SARS-CoV-2 protein-binding polypeptides) may be administered to a subject intravenously.

[0354] Typically, compositions and therapies of the disclosure are administered in a manner compatible with the dosage formulation, and in such amount as will be therapeutically effective and immune modifying. The quantity to be administered depends on the subject to be treated. Precise amounts of active ingredient required to be administered depend on the judgment of the practitioner.

[0355] The manner of application may be varied widely. Any of the conventional methods for administration of pharmaceutical compositions comprising cellular components are applicable. The dosage of the pharmaceutical composition will depend on the route of administration and will vary according to the size and health of the subject.

[0356] In many instances, it will be desirable to have multiple administrations of at most or at least 3, 4, 5, 6, 7, 8, 9, 10 or more. The administrations may range from 2-day to 12-week intervals, more usually from one to two week intervals.

[0357] The phrases “pharmaceutically acceptable” or “pharmacologically acceptable” refer to molecular entities and compositions that do not produce an adverse, allergic, or other untoward reaction when administered to an animal, or human. As used herein, “pharmaceutically acceptable carrier” includes any and all solvents, dispersion media, coatings, antibacterial and antifungal agents, isotonic and absorption delaying agents, and the like. The use of such media and agents for pharmaceutical active substances is well known in the art. Except insofar as any conventional media or agent is incompatible with the active ingredients, its use in immunogenic and therapeutic compositions is contemplated. The pharmaceutical compositions of the current disclosure are pharmaceutically acceptable compositions.

[0358] The compositions of the disclosure can be formulated for parenteral administration, e.g., formulated for injection via the intravenous, intramuscular, sub-cutaneous, or even intraperitoneal routes. Typically, such compositions can be prepared as injectables, either as liquid solutions or suspensions and the preparations can also be emulsified.

[0359] Pharmaceutical forms suitable for injectable use include sterile aqueous solutions or dispersions; formulations including sesame oil, peanut oil, or aqueous propylene glycol. It also should be stable under the conditions of manufacture and storage and must be preserved against the contaminating action of microorganisms, such as bacteria and fungi.

[0360] Sterile injectable solutions are prepared by incorporating the active ingredients (e.g., polypeptides of the disclosure) in the required amount in the appropriate solvent with various of the other ingredients enumerated above, as required, followed by filtered sterilization. Generally, dispersions are prepared by incorporating the various sterilized active ingredients into a sterile vehicle which contains the basic dispersion medium and the required other ingredients from those enumerated above.

[0361] An effective amount of a composition is determined based on the intended goal. The term “unit dose” or “dosage” refers to physically discrete units suitable for use in a subject, each unit containing a predetermined quantity of the composition calculated to produce the desired responses discussed herein in association with its administration, i.e., the appropriate route and regimen. The quantity to be administered, both according to number of treatments and unit dose, depends on the result and/or protection desired. Precise amounts of the composition also depend on the judgment of the practitioner and are peculiar to each individual. Factors affecting dose include physical and clinical state of the subject, route of administration, intended goal of treatment (alleviation of symptoms versus cure), and potency, stability, and toxicity of the particular composition. Upon formulation, solutions will be administered in a manner compatible with the dosage formulation and in such amount as is therapeutically or prophylactically effective. The formulations are easily administered in a variety of dosage forms, such as the type of injectable solutions described above.

[0362] The compositions and related methods of the present disclosure, particularly administration of a composition of the disclosure may also be used in combination with the administration of additional therapies such as the additional therapeutics described herein or in combination with other traditional therapeutics known in the art.

[0363] The therapeutic compositions and treatments disclosed herein may precede, be co-current with and/or follow another treatment or agent by intervals ranging from minutes to weeks. In instances where agents are applied separately to a cell, tissue or organism, one would generally ensure that a significant period of time did not expire between the time of each delivery, such that the therapeutic agents would still be able to exert an advantageously combined effect on the cell, tissue or organism. For example, in such instances, it is contemplated that one may contact the cell, tissue or organism with two, three, four or more agents or treatments substantially simultaneously (i.e., within less than about a minute). One or more therapeutic agents or treatments may be administered or provided within 1 minute, 5 minutes, 10 minutes, 20 minutes, 30 minutes, 45 minutes, 60 minutes, 2 hours, 3 hours, 4 hours, 5 hours, 6 hours, 7 hours, 8 hours, 9 hours, 10 hours, 11 hours, 12 hours, 13 hours, 14 hours, 15 hours, 16 hours, 17 hours, 18 hours, 19 hours, 20 hours, 21 hours, 22 hours, 22 hours, 23 hours, 24 hours, 25 hours, 26 hours, 27 hours, 28 hours, 29 hours, 30 hours, 31 hours, 32 hours, 33 hours, 34 hours, 35 hours, 36 hours, 37 hours, 38 hours, 39 hours, 40 hours, 41 hours, 42 hours, 43 hours, 44 hours, 45 hours, 46 hours, 47 hours, 48 hours, 1 day, 2 days, 3 days, 4 days, 5 days, 6 days, 7 days, 8 days, 9 days, 10 days, 11 days, 12 days, 13 days, 14 days, 15 days, 16 days, 17 days, 18 days, 19 days, 20 days, 21 days, 1 week, 2 weeks, 3 weeks, 4 weeks, 5 weeks, 6 weeks, 7 weeks, or 8 weeks or more, and any range derivable therein, prior to and/or after administering another therapeutic agent or treatment.

[0364] The treatments may include various “unit doses.” Unit dose is defined as containing a predetermined-quantity of the therapeutic composition. The quantity to be administered, and the particular route and formulation, is within the skill of determination of those in the clinical arts. A unit dose need not be administered as a single injection but may comprise continuous infusion over a set period of time. A unit dose may comprise a single administrable dose.

[0365] The quantity to be administered, both according to number of treatments and unit dose, depends on the treatment effect desired. An effective dose is understood to refer to an amount necessary to achieve a particular effect. It is contemplated that doses in the range from 10 mg/kg to 200 mg/kg can affect the protective capability of these agents. Thus, it is contemplated that doses include doses of about 0.1, 0.5, 1, 5, 10, 15, 20, 25, 30, 35, 40, 45, 50, 55, 60, 65, 70, 75, 80, 85, 90, 100, 105, 110, 115, 120, 125, 130, 135, 140, 145, 150, 155, 160, 165, 170, 175, 180, 185, 190, 195, and 200, 300, 400, 500, 1000 μg/kg, mg/kg, μg/day, or mg/day or any range derivable therein. Furthermore, such doses can be administered at multiple times during a day, and/or on multiple days, weeks, or months.

[0366] The therapeutically effective or sufficient amount of the immune checkpoint inhibitor, such as an antibody and/or microbial modulator, that is administered to a human may be in the range of about 0.01 to about 50 mg/kg of patient body weight whether by one or more administrations. The therapy used may be about 0.01 to about 45 mg/kg, about 0.01 to about 40 mg/kg, about 0.01 to about 35 mg/kg, about 0.01 to about 30 mg/kg, about 0.01 to about 25 mg/kg, about 0.01 to about 20 mg/kg, about 0.01 to about 15 mg/kg, about 0.01 to about 10 mg/kg, about 0.01 to about 5 mg/kg, or about 0.01 to about 1 mg/kg administered daily, for example. A therapy described herein may be administered to a subject at a dose of about 100 mg, about 200 mg, about 300 mg, about 400 mg, about 500 mg, about 600 mg, about 700 mg, about 800 mg, about 900 mg, about 1000 mg, about 1100 mg, about 1200 mg, about 1300 mg or about 1400 mg on day 1 of 21-day cycles. The dose may be administered as a single dose or as multiple doses (e.g., 2 or 3 doses), such as infusions. The progress of this therapy is easily monitored by conventional techniques.

[0367] The effective dose of the pharmaceutical composition may be one which can provide a blood level of about 1 μM to 150 μM. The effective dose may provide a blood level of about 4 μM to 100 μM; or about 1μ M to 100μ; or about 1μ M to 50μ; or about 1μ M to 40μ; or about 1 μM to 30 μM; or about 1 μM to 20 μM; or about 1 μM to 10 μM; or about 10 μM to 150 μM; or about 10 μM to 100 μM; or about 10 μM to 50 μM; or about 25 μM to 150 μM; or about 25 μM to 100 μM; or about 25 μM to 50 μM; or about 50 μM to 150 μM; or about 50 μM to 100 μM (or any range derivable therein). The dose can provide the following blood level of the agent that results from a therapeutic agent being administered to a subject: about, at least about, or at most about 1, 2, 3, 4, 5, 6, 7, 8, 9, 10, 11, 12, 13, 14, 15, 16, 17, 18, 19, 20, 21, 22, 23, 24, 25, 26, 27, 28, 29, 30, 31, 32, 33, 34, 35, 36, 37, 38, 39, 40, 41, 42, 43, 44, 45, 46, 47, 48, 49, 50, 51, 52, 53, 54, 55, 56, 57, 58, 59, 60, 61, 62, 63, 64, 65, 66, 67, 68, 69, 70, 71, 72, 73, 74, 75, 76, 77, 78, 79, 80, 81, 82, 83, 84, 85, 86, 87, 88, 89, 90, 91, 92, 93, 94, 95, 96, 97, 98, 99, or 100 μM or any range derivable therein. The therapeutic agent may be administered to a subject and may be metabolized in the body to a metabolized therapeutic agent, in which case the blood levels may refer to the amount of that agent. Alternatively, to the extent the therapeutic agent is not metabolized by a subject, the blood levels discussed herein may refer to the unmetabolized therapeutic agent.

[0368] Precise amounts of the therapeutic composition also depend on the judgment of the practitioner and are peculiar to each individual. Factors affecting dose include physical and clinical state of the patient, the route of administration, the intended goal of treatment (alleviation of symptoms versus cure) and the potency, stability and toxicity of the particular therapeutic substance or other therapies a subject may be undergoing.

[0369] It will be understood by those skilled in the art and made aware that dosage units of μg/kg or mg/kg of body weight can be converted and expressed in comparable concentration units of μg/ml or mM (blood levels), such as 4 μM to 100 μM. It is also understood that uptake is species and organ/tissue dependent. The applicable conversion factors and physiological assumptions to be made concerning uptake and concentration measurement are well-known and would permit those of skill in the art to convert one concentration measurement to another and make reasonable comparisons and conclusions regarding the doses, efficacies and results described herein.

### X. Detectable Labels

[0370] It will be useful to detectably or therapeutically label an antibody or antigen binding fragment. Methods for conjugating polypeptides to these agents are known in the art. For the purpose of illustration only, polypeptides can be labeled with a detectable moiety such as a radioactive atom, a chromophore, a fluorophore, or the like. Such labeled polypeptides can be used for diagnostic techniques, either in vivo, or in an isolated test sample or in methods described herein.

[0371] As used herein, the term “label” intends a directly or indirectly detectable compound or composition that is conjugated directly or indirectly to the composition to be detected, e.g., polynucleotide or protein such as an antibody so as to generate a “labeled” composition. The term also includes sequences conjugated to the polynucleotide that will provide a signal upon expression of the inserted sequences, such as green fluorescent protein (GFP) and the like. The label may be detectable by itself (e.g. radioisotope labels or fluorescent labels) or, in the case of an enzymatic label, may catalyze chemical alteration of a substrate compound or composition that is detectable. The labels can be suitable for small scale detection or more suitable for high-throughput screening. As such, suitable labels include, but are not limited to radioisotopes, fluorochromes, chemiluminescent compounds, dyes, and proteins, including enzymes. The label may be simply detected or it may be quantified. A response that is simply detected generally comprises a response whose existence merely is confirmed, whereas a response that is quantified generally comprises a response having a quantifiable (e.g., numerically reportable) value such as an intensity, polarization, and/or other property. In luminescence or fluorescence assays, the detectable response may be generated directly using a luminophore or fluorophore associated with an assay component actually involved in binding, or indirectly using a luminophore or fluorophore associated with another (e.g., reporter or indicator) component.

[0372] Examples of luminescent labels that produce signals include, but are not limited to bioluminescence and chemiluminescence. Detectable luminescence response generally comprises a change in, or an occurrence of, a luminescence signal. Suitable methods and luminophores for luminescently labeling assay components are known in the art and described for example in Haugland, Richard P. (1996) Handbook of Fluorescent Probes and Research Chemicals (6.sup.th ed.). Examples of luminescent probes include, but are not limited to, aequorin and luciferases.

[0373] Examples of suitable fluorescent labels include, but are not limited to, fluorescein, rhodamine, tetramethylrhodamine, eosin, erythrosin, coumarin, methyl-coumarins, pyrene, Malacite green, stilbene, Lucifer Yellow, Cascade Blue™, and Texas Red. Other suitable optical dyes are described in the Haugland, Richard P. (1996) Handbook of Fluorescent Probes and Research Chemicals (6.sup.th ed.).

[0374] The fluorescent label may be functionalized to facilitate covalent attachment to a cellular component present in or on the surface of the cell or tissue such as a cell surface marker. Suitable functional groups, including, but not are limited to, isothiocyanate groups, amino groups, haloacetyl groups, maleimides, succinimidyl esters, and sulfonyl halides, all of which may be used to attach the fluorescent label to a second molecule. The choice of the functional group of the fluorescent label will depend on the site of attachment to either a linker, the agent, the marker, or the second labeling agent.

[0375] Attachment of the fluorescent label may be either directly to the cellular component or compound or alternatively, can by via a linker. Suitable binding pairs for use in indirectly linking the fluorescent label to the intermediate include, but are not limited to, antigens/polypeptides, e.g., rhodamine/anti-rhodamine, biotin/avidin and biotin/strepavidin.

[0376] The coupling of polypeptides to low molecular weight haptens can increase the sensitivity of the antibody in an assay. The haptens can then be specifically detected by means of a second reaction. For example, it is common to use haptens such as biotin, which reacts avidin, or dinitrophenol, pyridoxal, and fluorescein, which can react with specific anti-hapten polypeptides. See, Harlow and Lane (1988) supra.

### XI. Sample Preparation

[0377] Methods can involve obtaining or evaluating a sample from a subject. The sample may include a sample obtained from any source including but not limited to blood, sweat, hair follicle, buccal tissue, tears, menses, feces, or saliva. Any medical professional such as a doctor, nurse or medical technician may obtain a biological sample for testing. Yet further, the biological sample can be obtained without the assistance of a medical professional.

[0378] A sample may include but is not limited to, tissue, cells, or biological material from cells or derived from cells of a subject. The biological sample may be a heterogeneous or homogeneous population of cells or tissues. The biological sample may be obtained using any method known to the art that can provide a sample suitable for the analytical methods described herein. The sample may be obtained by non-invasive methods including but not limited to: scraping of the skin or cervix, swabbing of the cheek, saliva collection, urine collection, feces collection, collection of menses, tears, or semen.

[0379] The sample may be obtained by methods known in the art. The samples may be obtained by biopsy. The sample may be obtained by swabbing, endoscopy, scraping, phlebotomy, or any other methods known in the art. In some cases, the sample may be obtained, stored, or transported using components of a kit of the present methods. In some cases, multiple samples, such as multiple esophageal samples may be obtained for diagnosis by the methods described herein. In other cases, multiple samples, such as one or more samples from one tissue type (for example esophagus) and one or more samples from another specimen (for example serum) may be obtained for diagnosis by the methods. In some cases, multiple samples such as one or more samples from one tissue type (e.g. esophagus) and one or more samples from another specimen (e.g. serum) may be obtained at the same or different times. Samples may be obtained at different times are stored and/or analyzed by different methods. For example, a sample may be obtained and analyzed by routine staining methods or any other cytological analysis methods.

[0380] The biological sample may be obtained by a physician, nurse, or other medical professional such as a medical technician, endocrinologist, cytologist, phlebotomist, radiologist, or a pulmonologist. The medical professional may indicate the appropriate test or assay to perform on the sample. A molecular profiling business may consult on which assays or tests are most appropriately indicated. The patient or subject may obtain a biological sample for testing without the assistance of a medical professional, such as obtaining a whole blood sample, a urine sample, a fecal sample, a buccal sample, or a saliva sample.

[0381] In other cases, the sample is obtained by an invasive procedure including but not limited to: biopsy, needle aspiration, endoscopy, or phlebotomy. The method of needle aspiration may further include fine needle aspiration, core needle biopsy, vacuum assisted biopsy, or large core biopsy. Multiple samples may be obtained by the methods herein to ensure a sufficient amount of biological material.

[0382] General methods for obtaining biological samples are also known in the art. Publications such as Ramzy, Ibrahim Clinical Cytopathology and Aspiration Biopsy 2001, which is herein incorporated by reference in its entirety, describes general methods for biopsy and cytological methods. In some cases, the fine needle aspirate sampling procedure may be guided by the use of an ultrasound, X-ray, or other imaging device.

[0383] The molecular profiling business may obtain the biological sample from a subject directly, from a medical professional, from a third party, or from a kit provided by a molecular profiling business or a third party. In some cases, the biological sample may be obtained by the molecular profiling business after the subject, a medical professional, or a third party acquires and sends the biological sample to the molecular profiling business. In some cases, the molecular profiling business may provide suitable containers, and excipients for storage and transport of the biological sample to the molecular profiling business.

[0384] A medical professional may need not be involved in the initial diagnosis or sample acquisition. An individual may alternatively obtain a sample through the use of an over the counter (OTC) kit. An OTC kit may contain a means for obtaining said sample as described herein, a means for storing said sample for inspection, and instructions for proper use of the kit. In some cases, molecular profiling services are included in the price for purchase of the kit. In other cases, the molecular profiling services are billed separately. A sample suitable for use by the molecular profiling business may be any material containing tissues, cells, nucleic acids, genes, gene fragments, expression products, gene expression products, or gene expression product fragments of an individual to be tested. Methods for determining sample suitability and/or adequacy are provided.

[0385] The subject may be referred to a specialist such as an oncologist, surgeon, or endocrinologist. The specialist may likewise obtain a biological sample for testing or refer the individual to a testing center or laboratory for submission of the biological sample. In some cases the medical professional may refer the subject to a testing center or laboratory for submission of the biological sample. In other cases, the subject may provide the sample. In some cases, a molecular profiling business may obtain the sample.

### XII. Host Cells

[0386] As used herein, the terms “cell,” “cell line,” and “cell culture” may be used interchangeably. All of these terms also include both freshly isolated cells and ex vivo cultured, activated or expanded cells. All of these terms also include their progeny, which is any and all subsequent generations. It is understood that all progeny may not be identical due to deliberate or inadvertent mutations. In the context of expressing a heterologous nucleic acid sequence, “host cell” refers to a prokaryotic or eukaryotic cell, and it includes any transformable organism that is capable of replicating a vector or expressing a heterologous gene encoded by a vector. A host cell can, and has been, used as a recipient for vectors or viruses. A host cell may be “transfected” or “transformed,” which refers to a process by which exogenous nucleic acid, such as a recombinant protein-encoding sequence, is transferred or introduced into the host cell. A transformed cell includes the primary subject cell and its progeny.

[0387] Transfection can be carried out on any prokaryotic or eukaryotic cell. Electroporation can involve transfection of a human cell. Electroporation can involve transfection of an animal cell. Transfection can involve transfection of a cell line or a hybrid cell type. The cells or cell lines can be A549, B-cells, B16, BHK-21, C2C12, C6, CaCo-2, CAP/, CAP-T, CHO, CHO2, CHO-DG44, CHO-K1, COS-1, Cos-7, CV-1, Dendritic cells, DLD-1, Embryonic Stem (ES) Cell or derivative, H1299, HEK, 293, 293T, 293 FT, Hep G2, Hematopoietic Stem Cells, HOS, Huh-7, Induced Pluripotent Stem (iPS) Cell or derivative, Jurkat, K562, L5278Y, LNCaP, MCF7, MDA-MB-231, MDCK, Mesenchymal Cells, Min-6, Monocytic cell, Neuro2a, NIH 3T3, NIH3T3L1, K562, NK-cells, NS0, Panc-1, PC12, PC-3, Peripheral blood cells, Plasma cells, Primary Fibroblasts, RBL, Renca, RLE, SF21, SF9, SH-SY5Y, SK-MES-1, SK-N-SH, SL3, SW403, Stimulus-triggered Acquisition of Pluripotency (STAP) cell or derivate SW403, T-cells, THP-1, Tumor cells, U2OS, U937, peripheral blood lymphocytes, expanded T cells, hematopoietic stem cells, or Vero cells.

### XIII. Kits

[0388] Also described are kits containing compositions of the disclosure or compositions to implement methods of the disclosure. Kits can be used to detect the presence of a SARS-CoV-2 virus in a sample. A kit can contain, contain at least or contain at most 1, 2, 3, 4, 5, 6, 7, 8, 9, 10, 11, 12, 13, 14, 15, 16, 17, 18, 19, 20, 21, 22, 23, 24, 25, 26, 27, 28, 29, 30, 31, 32, 33, 34, 35, 36, 37, 38, 39, 40, 41, 42, 43, 44, 45, 46, 47, 48, 49, 50, 100, 500, 1,000 or more probes, primers or primer sets, synthetic molecules or inhibitors, or any value or range and combination derivable therein. A kit can contain one or more polypeptides capable of binding to a SARS-CoV-2 spike protein, including polypeptides disclosed herein. For example, a kit may comprise at least 1, 2, 3, 4, 5, 6, 7, 8, 9, 10 or more Fabs disclosed herein for detecting a SARS-CoV-2 spike protein. A kit may comprise a detection pair. A kit may comprise an enzyme. A kit may comprise a substrate for an enzyme.

[0389] Kits may comprise components, which may be individually packaged or placed in a container, such as a tube, bottle, vial, syringe, or other suitable container means.

[0390] Individual components may also be provided in a kit in concentrated amounts; a component may be provided individually in the same concentration as it would be in a solution with other components. Concentrations of components may be provided as 1×, 2×, 5×, 10×, or 20× or more.

[0391] Kits for using probes, synthetic nucleic acids, nonsynthetic nucleic acids, and/or inhibitors of the disclosure for prognostic or diagnostic applications are included as part of the disclosure. Negative and/or positive control nucleic acids, probes, and inhibitors may be included in some kits.

[0392] Kits may further comprise instructions for use. For example, a kit comprises instructions for detecting a SARS-CoV-2 virus in a sample.

[0393] It is contemplated that any method or composition described herein can be implemented with respect to any other method or composition described herein and that different aspects may be combined. The claims originally filed are contemplated to cover claims that are multiply dependent on any filed claim or combination of filed claims.

### XIV. EXAMPLES

[0394] The following examples are included to demonstrate certain aspects of the invention. It should be appreciated by those of skill in the art that the techniques disclosed in the examples which follow represent techniques discovered by the inventor to function well in the practice of the invention. However, those of skill in the art should, in light of the present disclosure, appreciate that many changes can be made in the specific embodiments and aspects which are disclosed and still obtain a like or similar result without departing from the spirit and scope of the invention.

### Example 1-Cross Neutralization of Emerging SARS-CoV-2 Variants of Concern by Antibodies Targeting Distinct Epitopes on Spike

### A. Results

1. Convalescent Sera have Reduced Antibody Titers but Retain Neutralization Capabilities against Circulating SARS-CoV-2 VOCs

[0395] To investigate whether antibodies from subjects naturally infected with WT SARS-CoV-2 lost binding or neutralization activity against VOCs, the inventors collected blood samples from 10 convalescent donors at a median of 49 days post-symptom onset^{26, 27} (Supplementary Table 1) forin-depth analysis of specificity of individual memory B cells. As an initial estimate of antibody activity from these patients, serum antibody reactivity was measured comparing reactivity to WTtrimeric SARS-CoV-2 spike and spike proteins from the D614G, B.1.1.7, B. 1.351, P.1, B.1.617.2, B.1.526, and B.1.617.1 variants. While serum antibody IgG titers from these 10 patients against WT and D614G spike antigens were similar, titers were significantly reduced against the spike proteins of B.1.1.7 (1.4-fold), B.1.351 (1.5-fold), P.1 (3.8-fold), B.1.617.2 (1.5-fold), B.1.526 (1.3-fold), and B.1.617.1 (2.3-fold) relative to WT spike protein (FIG. 1a). Similarly, IgG titers against the RBD of B.1.1.7 (1.7-fold), B.1.351 (2.8-fold) and P.1 (2.6-fold) were reduced compared to WT RBD. However, the inventors noted that there was less than a 2-fold decrease in antibody binding against single mutants of the RBD (FIG. 1b). Despite reductions in serum binding activity, the sera retained similar neutralizing titers against the WT, B.1.1.7 and P.1 SARS-CoV-2 variants. However, the inventors found a significant reduction in neutralization against B.1.617.1 and B.1.617.2 compared to WT (FIG. 1c). Although antibody titers were lower against the VOCs and VUMs, these data indicate that serum antibodies elicited by natural WT infection were able to neutralize B.1.1.7, P.1 and WT virus equally, while most donors lost neutralizing potential against B.1.617-lineage viruses.

### 2. Generation of Mabs Against Distinct Domains of the Sars-Cov-2 Spike

[0396] The inventors next sought to determine the specificities of antibodies that could cross-neutralize these viral variants by generating mAbs from spike-binding B cells isolated from 10 convalescent subjects collected between April and July of 2020^{26, 27}. The inventors sort-purified B cells binding to spike and/or RBD fluorophore- and oligo-conjugated probes, and performed single-cell RNA-sequencing and B cell receptor sequencing. As the antigen probes included a DNA oligonucleotide sequence, the inventors were able to track the antigen-specificity of isolated B cells. In total, the inventors obtained 1,703 paired immunoglobulin heavy and light chains from non-RBD- and RBD-binding B cells specific for the spike. Overall, the percentage of spike non-RBD-binding B cells was 4-fold higher than RBD-binding B cells (FIG. 2a-c), indicating that natural WT infection preferentially induced B cell response toward epitopes on the spike outside of the RBD28.29. Overall, B cells targeting the RBD or epitopes outside of the RBD utilized similar V (D) J genes, had overlapping heavy and light chain pairings, and possessed similar numbers of mutations and complementarity determining region 3 (CDR3) lengths (FIG. 5a-i).

[0397] Based on the acquired antibody sequences and probe-binding intensities, the inventors generated 43 mAbs from all 10 donors specific to the WT spike protein (Supplementary Table 2). To investigate specific domain targeting, mAbs were tested for binding to the RBD and monomeric S1 and S2 recombinant spike antigens. Based on binding to these discrete antigens, spike-reactive mAbs were categorized into 4 groups: NTD-A-reactive mAbs (n=5) that bound strongly to S1 but not RBD, NTD-B-reactive mAbs (n=7) that weakly bind S1 but not RBD, S2-reactive mAbs (n=2), and RBD-reactive mAbs (n=29) (FIG. 2d-e). Additionally, NTD-A and NTD-B-classified antibodies targeted distinct epitopes as shown by competition ELISA (FIG. 6a). The inventors further determined whether antibodies with different binding specificities differ in their neutralization capacity against WT SARS-CoV-2. Of the 43 mAbs, 18 (42%) were neutralizing. Notably, only mAbs binding the RBD and NTD-B were neutralizing, whereas all mAbs binding NTD-A and S2 were non-neutralizing (FIG. 2d-f). Moreover, 52% of RBD-targeting mAbs were neutralizing, with eight mAbs being potently neutralizing antibodies (50% inhibitory concentration, IC50, of <500 ng/ml), and three out of seven NTD-B mAbs having moderate neutralization potency (5,000-7,500 ng/ml) (FIG. 2g-h). Of the 10 convalescent donors, seven had at least one neutralizing mAb among the antibodies cloned for this study, although the potencies of the mAbs varied by donor (FIG. 2i). Together, these data reveal that mAbs against the RBD are the predominate source of neutralizing antibodies induced by WT SARS-CoV-2 infection.

### 3. Binding and Neutralizing Breadth of Non-RBD Spike Antibodies

[0398] To understand the effects of viral variants on mAb binding to epitopes on the spike outside of the RBD, the inventors tested non-RBD-targeting mAbs for binding to a panel of SARS-CoV-2 variants, including D614G and the emerging variants B.1.1.7, B.1.351, P.1, B.1.617.2, B.1.526 and

[0399] B.1.617.1 (FIG. 3a-g). All non-RBD spike-reactive antibodies showed similar binding to the D614G spike. Furthermore, all mAbs targeting NTD-A and S2 maintained similar binding to the spike of the B.1.1.7, B.1.351, P.1, B.1.617.2, B.1.526 and B.1.617.1 variants (FIG. 3h). Although mAbs against NTD-A and S2 retain binding to VOCs, they are non-neutralizing, implying that NTD-A- and S2-reactive antibodies may provide limited immune pressure to mutate these epitopes. Of interest, NTD-B mAbs showed significantly reduced binding to the spike of B.1.1.7, B.1.351, B.1.617.2 and B.1.617.1 while showing similar binding to B.1.526, and a minor reduction in binding to the spike of P.1 (FIG. 3h). Two of the three neutralizing NTD-B binding mAbs (S166-32 and S305-1456), which were isolated from two different subjects, retained neutralization potential against B.1.1.7 and P.1 at moderate neutralizing potency (FIG. 3h). The third neutralizing NTD-B-binding mAb (S24-1301) also had moderate neutralizing potency against the WT strain with weak cross-neutralization activity against the P.1 variant and no neutralization activity against B.1.1.7, consistent with its binding profile (FIG. 3h). However, all three neutralizing NTD-B mAbs failed to neutralize B.1.617.1 and B.1.617.2. Together, our data indicate that antibodies against NTD-B show cross-neutralization capacity and thus may provide protection against some emerging VOCs, such as B.1.1.7 and P.1. However, antibodies targeting the NTD-B epitope may be driving spike evolution, particularly the mutations and deletions found within B.1.1.7, B.1.351, B.1.617.1 and B.1.617.2, leaving the future of this epitope as a reliable target for cross-reactive antibodies uncertain.

4. A Subset of RBD-Binding mAbs Retain Neutralization Activity Against VOCs

[0400] Viral escape mutations occurring within the RBD may result in reduction in neutralization capacity of RBD-targeting antibodies³⁰⁻³². To understand the impacts of RBD mutations on mAb binding, the inventors tested RBD-targeting mAbs for binding to RBD mutants that possessed a single mutation found in circulating SARS-CoV-2 VOCs, VOIs, VUMs or artificial mutants at key contact residues of the RBD-ACE2 interaction³⁰⁻³⁵, as well as full-length spike constructs containing multiple mutations in the RBD (Supplementary Table 3). In addition, the inventors tested mAb binding to the RBDs of SARS-CoV-1 and Middle Eastern Respiratory Syndrome (MERS)-CoV to investigate cross-reactivity to other coronaviruses. Notably, RBD-binding mAbs have been classified into four classes, classes 1-4 or receptor binding site (RBS) A-D, based on structural analysis and antibody binding features^{36, 37}. More recently, classification of four key antigenic regions of the RBD can also be defined by determining the loss of binding to RBD mutants (class 1-3 epitopes) or binding to cryptic epitopes on the RBD that are conserved across SARS-CoV-1 and MERS-CoV RBDs (class 4 epitope, FIG. 4a-b) 30.38. Based on the binding profiles of class 1˜4 binding mAbs, the inventors were able to segregate 23 out of 29 mAbs into one of the four classes (FIG. 4c and Supplementary FIG. 2b). Notably, no class 1 mAbs were found and six mAbs could not be classified as they either lost binding to multiple mutant classes or bound equally to all RBD mutants but did not bind to SARS-CoV-1 or MERS-CoV.

[0401] Class 2 RBD-binding mAbs showed reduced binding to at least one of the RBD class 2 single escape mutants, notably E484K and F490K, and the majority of these mAbs lost binding to the RBD mutants found in the B.1.351, P.1, B.1.526 and B.1.617.1 (FIG. 4c). Of the 12 class 2 mAbs, 11 were potently neutralizing against WT SARS-CoV-2. Of the neutralizing class 2 mAbs, all but one neutralized B.1.1.7 at concentrations comparable to neutralization of the WT strain. By contrast, six neutralized B.1.617.2 at lower potency compared to WT and B.1.1.7. Seven of the class 2 mAbs retained their neutralization activity against at least two VOCs (FIG. 4c). Of note, 10 out of 11 neutralizing class 2 mAbs were unable to neutralize the variants that harbored a mutation at E484, P.1 and B.1.617.1. This is in line with previous studies, which have shown that the E484K and E484Q mutations are the key escaping residue responsible for neutralization resistance by P.1, P.2, B.1.351 and B.1.617.1 VOCs^{2, 4, 39}. Of greatest interest, S144-1406, which retained binding to E484K and to all spike variants, neutralized B.1.1.7 and P.1 variants with high neutralization potency. Similar to another E484K-binder, S24-1224 neutralized three out of four VOCs tested, including B.1.617.1 (FIG. 4c). These data indicate that some class 2 antibodies can cross-neutralize VOCs. Additionally, the epitope targeted by S144-1406 partially overlapped with S24-1224 and other class 2 mAbs that failed to neutralize P.1 and B.1.617.1 (FIG. 6c), suggesting class 2 mAbs target similar but slightly different RBD epitopes.

[0402] Only one mAb (S24-821) specifically lost binding to the class 3 mutants, particularly to N439K and N440K, which are associated with circulating SARS-CoV-2 variants^{35, 40} and have been reported as in vitro escape sites for class 3 epitope-binding mAbs^{30, 31, 35} (FIG. 4b and Supplementary Table 3). Moreover, the inventors classified five more mAbs as class 3-like as they strongly competed for RBD binding with S24-821 but did not compete with class 2 mAbs (FIG. 6b). Importantly, all class 3 and class 3-like mAbs maintained binding to L452R, another mutation associated with class 3 antibodies that is present in B.1.427/B.1.429^{19, 41} and B.1.617 variants²⁰ (FIG. 4c). However, there was 2-3-fold reduction of class 3 and class 3-like mAbs in binding against B.1.617.2 which carry T487K and L452R substitutions in RBD region. Of the four neutralizing class 3 and class 3-like mAbs, all four retained neutralization activity against B.1.1.7 and three were neutralizing against P.1 (FIG. 4b). In contrast to class 2 mAbs, B.1.617.2 was resistant to all class 3-neutralizing mAbs. Only one mAb (S24-821) retained modest neutralization potency to B.1.617.1, indicating antibodies binding class 3 epitopes could neutralize some VOCs even though they bound L452R single mutation and all spike variants.

[0403] All of the mAbs that were categorized into class 4 (n=5) maintained binding to all RBD mutants and spike variants and displayed cross-reactivity to the SARS-CoV-1 RBD. However, all class 4 mAbs were non-neutralizing against WT virus, suggesting antibodies against this epitope are likely not strong drivers of antigenic drift. Notably, three antibodies in the class 4 group utilized the same heavy chain gene, VH5-51, as CR3022 and competed with CR3022 for binding to the RBD, indicating the class 4 antibodies in our study likely target the same or a similar epitope as CR3022 (Supplementary Table 2 and FIG. 6d). This is consistent with a previous study showing CR3022 cross-reacts with SARS-CoV-1, suggesting class 4 antibodies are common across subjects and studies 17.30.

[0404] With the classification of mAbs against distinct epitopes, the inventors next tested the relative abundance of serum antibodies against these distinct epitopes of the RBD and NTD by performing competition assays. Notably, donors had significantly higher titers of serum antibodies targeting class 3 (S24-821) and class 3-like (S20-74) epitopes, whereas subjects largely had undetectable titers against class 2 and NTD-B epitopes, suggesting WT SARS-CoV-2 infection predominately induces polyclonal antibodies targeting RBD class 3 epitopes that can neutralize emerging VOCs B.1.1.7 and P.1. (FIG. 6e). These data are consistent with the observed anti-B.1.1.7 and anti-P.1 serum neutralizing titers shown in FIG. 1c, suggesting the retention of serum neutralization activity could be due to abundant class 3 antibody responses. Loss of neutralization capabilities to B.1.617-lineage viruses may be due to insufficient levels of class 2 serum antibodies. A comparison of the neutralization capabilities of mAbs targeting different epitopes revealed class 2 RBD-reactive mAbs were the most potently neutralizing followed by mAbs targeting class 3 RBD epitopes and NTD-B (FIG. 7a). It is important to note that none of neutralizing mAbs induced by natural WT infection were able to neutralize all emerging SARS-CoV-2 variants. Nonetheless, the inventors identified at least one mAb that could neutralize each VOC, suggesting the convalescent donors generated a diverse cross-neutralizing antibody response (FIG. 7b). Therefore, antibodies targeting multiple epitopes on the spike are a valuable source of neutralizing antibodies against emerging VOCs. Additionally, the inventors found majority of antibodies isolated from donors who had high antibody titers exhibited lower neutralizing potency than antibodies derived from donors who had lower serological titers and less severity (FIG. 7b and Supplementary Table 1). However, there was no difference between high and low responders in generating of cross-neutralizing antibodies against VOCs and VUMs. Moreover, the cross-neutralizing RBD-targeting mAbs used V (D) J gene features similar to other published RBD-binding mAbs (Supplementary Table 3)+2-++. However, the mAbs in our studies utilized distinct heavy and light chain pairings, indicating these clones are not public with other known neutralizing SARS-CoV-2 antibodies. Despite this, the data indicate that cross-neutralizing antibodies use a diverse antibody repertoire against multiple distinct epitopes. Therefore, driving a polyclonal antibody response against these three epitopes may provide cross-neutralizing protection against existing and future variants.

### B. Discussion

[0405] This study shows WT SARS-CoV-2-convalescent individuals possess antibodies that can effectively cross-neutralize against emerging VOCs, with cross-neutralizing antibodies targeting multiple epitopes of the spike protein. In total, the inventors identified 12 mAbs that potently neutralize current circulating VOCs, including B.1.1.7, the alpha variant that has been reported to be more infectious^{8, 19}, P.1, the gamma variant that partially escapes both natural and vaccine-induced humoral immunity^{2, 12, 45}, and B.1.617.2, the delta variant that is more transmissible than the alpha variant and has led to a surge of more hospitalizations in India and can evade partial immunity induced by one vaccine dose^{4, 15, 23}. Convalescent subjects in our cohort had sufficient serum titers to neutralize both B.1.1.7 and P.1 but not B.1.617, suggesting that the cross-neutralizing mAbs identified in this study may play an important role in polyclonal neutralization for some of VOCs.

[0406] Using high-throughput antigen probing at the single B cell level, the inventors found that B cells isolated from convalescent subjects largely targeted non-RBD epitopes rather than potently neutralizing epitopes on the RBD. Similarly, mRNA vaccines also largely induce antibodies against non-neutralizing epitopes, suggesting epitopes outside of the RBD are immunodominant⁴⁶. Despite this, vaccination has been shown to induce cross-neutralizing antibodies¹, suggesting both natural WT infection and currently approved vaccines can elicit protective humoral immunity against emerging variants. As the inventors identified 12 antibodies cross-neutralizing to VOCs derived from seven different convalescent COVID-19 donors, these study suggests most people generate a cross-neutralizing antibody response. Notably, these antibodies largely target three distinct epitopes, including two sites on the RBD and the one on the NTD. Several recent studies have demonstrated that antibodies against the NTD and S2 are neutralizing⁴⁷⁻⁴⁹. Although the anti-S2 mAbs identified in our study were non-neutralizing, S2-binding antibodies exhibit broad reactivity with spike proteins from SARS-CoV-2 variants, related beta coronaviruses such as SARS-CoV-1 and MERS-CoV, and distantly related endemic coronaviruses. Moreover, anti-spike serum antibodies can mediate protection via Fc-mediated functions, suggesting a combination of neutralizing antibodies and polyfunctional antibodies will provide optimal protection against infection with variants of SARS-CoV-250.

[0407] This study also showed that anti-RBD mAbs are primarily class 2 mAbs, consistent with other reports^{30, 37, 43, 51}. The majority of class 2 mAbs retained their neutralization activity against B.1.1.7 and B.1.617.2, but were largely non-neutralizing against P.1, suggesting class 2 mAbs may have driven the evolution of P.1 mutants. In contrast, neutralizing class 3 mAbs retained their neutralization activity against both B.1.1.7 and P.1, but did not neutralize the B.1.617 variants. Notably, none of the neutralizing mAbs could cross-neutralize B.1.1.7, P.1 and B.1.617.2, the most prevalent VOCs at this time. Therefore, vaccination approaches to increase affinity and frequencies of antibodies to the S1 domain may enhance the breadth of protection against emerging SARS-CoV-2 VOCs, including epitopes on the RBD and NTD. It is likely that targeting multiple epitopes will provide optimal protection so as to avoid generating escape mutants that can evade antibodies against any one epitope. Moreover, vaccinating previously infected subjects has been shown to substantially improve neutralization titers³ and may allow for refinement of memory B cells against neutralizing epitopes.

[0408] In conclusion, this study shows SARS-CoV-2 infection induces cross-neutralizing immunity against circulating VOCs, which is likely attributed to polyclonal antibodies targeting multiple epitopes of the spike protein. This work emphasizes the need for the induction of cross-neutralizing antibodies that bind distinct sites on the spike with various mechanisms that can synergize to provide protection against SARS-CoV-2 variants as well as limit the virus from escaping any single antibody target.

### C. Materials & Methods

### 1. Study Cohort and Spike-Specific B Cells Sorting

[0409] All studies were performed with the approval of the University of Chicago institutional review board IRB20-0523 and University of Chicago, University of Wisconsin-Madison. Informed consent was obtained after the research applications and possible consequences of the studies were disclosed to study subjects. The details of PBMC collection from leukoreduction filters were described elsewhere²⁷. For spike-specific B cells sorting, PBMC were thawed in 37° C. water bath and B cells were enriched using human pan B cell EasySep™ enrichment kit (STEMCELL). B cells were stained with anti-CD19-PE-Cy7 (Biolegend) and anti-CD3-BV510 (BD Biosciences) and antigen probes (PE) for 30 minutes on ice in 1×PBS supplemented with 0.2% BSA and 2 mM Pierce Biotin. Probe generation was performed as previously described²⁷. Cells were subsequently washed with 1×PBS with 0.2% BSA and stained with Live/Dead BV510 (Thermo Fisher) in 1×PBS for 15 minutes. Cells were washed again and re-suspended at a maximum of 4 million cells/mL in 1×PBS supplemented with 0.2% BSA and 2 mM Pierce Biotin for downstream cell sorting using the MACSQuantTyto cartridge sorting platform (Miltenyi). Viable/CD19+/antigen-PE+ cells were sorted as probe positive. Cells were then collected from the cartridge sorting chamber and used for downstream processing with the chromium controller (10× Genomics).

### 2. Single-Cell RNA-Seq and B Cell Receptor Sequencing

[0410] The human B cell V (D) J, 5′ gene expression, feature barcode libraries were prepared according to manufacturer's instructions. Libraries were pooled and sequenced using an Illumina NextSeq 550 or an Illumina NextSeq 500 at the University of Chicago. Cell Ranger (version 3.0.2) was used to perform raw sequencing processing, sample de-multiplexing, barcode processing, single-cell 5′ transcripts counting and B cell receptor repertoire sequences assembly. The reference genome assembly for transcriptome is GRCh38-1.2.0, and reference genome assembly for V (D) J is cellranger-vdj-GRCh38-alts-ensembl-2.0.0. The data obtained from Cell Ranger were subsequently performed downstream analysis using Seurat toolkit (version 3.2.0, an R package, for transcriptome, cell surface protein and antigen probe analysis) 52 and IgBlast (version 1.15) for immunoglobulin gene analysis⁵³. Cell quality control (QC), normalization, data scaling, and linear dimensional reduction, clustering, differential expression analysis, batch effects correction, and data visualization were processed using Seurat (version 3.2.0). The QC of cells were performed further to exclude cells with less than 200 and more then 2500 detected genes and cells expressing high percentage of mitochondrial genes. Transcriptome RNA data was analyzed using conventional log normalization. The inventors performed principal component analysis (PCA) and used the top 15 principal components (PCs) in linear dimensional reduction and clustering. Only filtered, high-quality cells were clustered in this analysis using Louvain algorithm implemented in Seurat under the resolution of 0.6 for clustering. Batch effects across different datasets were normalized using an Anchor method implemented in Seurat.

### 3. Monoclonal Antibody Production

[0411] B cells were selected for mAb generation based on antigen probe intensity visualized by JMPPro 15, as previous described²⁷. Antibody heavy and light chain genes obtained by 10× Genomics V(D)J sequencing analysis were synthesized by Integrated DNA Technologies. The synthesized fragments for heavy and light chain with 5′ and 3′ Gibson overhangs were then cloned into human IgG1 and human kappa or lambda light chain expression vectors by Gibson assembly as previously described⁵⁴. The heavy and light chains of a corresponding mAb were co-transfected into HEK293T cells. After 4 days, secreted mAbs in the medium supernatant were harvested and purified using protein A agarose beads (Thermo Fisher).

### 4. Recombinant Proteins

[0412] The recombinant WT SARS-CoV-2 full-length (FL) spike, D614G FL spike, WT RBD, K417T/R/A RBD, N501Q/A RBD, and SARS-CoV-1 RBD and MERS-CoV were generated in-house either by using gBlock fragment synthesized by Integrated DNA Technologies or by performing single-site mutagenesis, and expressed by Expi293F cells (Thermo Fisher). The recombinant FL spikes derived from variants of B.1.1.7, B.1.351, P.1, B.1.617.2, B.1.526, and were kindly provided by Dr. Noah Sather laboratory at Seattle Children's Research Institute. The recombinant RBD found in VOCs, B.1.351 or P.1 variants, and RBD with single mutation or multiple mutations (N439: Y453F, E406Q, K417E, K417V, Y453F, F486A, N487R, F490K, Q493R, N439K, N440K, N501Y) were generously provided from the Krammer laboratory at Icahn School of Medicine at Mount Sinai. The recombinant S1 and S2 subunit, and RBD with single mutation of K417N, E484K and L452R were obtained from Sino Biological. The protein sequences and resources for each antigen are listed in Extended Data Table 3.

### 5. Virus Neutralization Assay

[0413] Virus neutralization assays were performed with different variants of SARS-CoV-2 on Vero E6/TMPRSS2 (Extended Data Table 4). Virus (˜100 plaque-forming units) was incubated with an equal volume of two-fold diluted of serum or mAbs for 1 hour. Plasma samples were diluted in calcium free media, while antibodies were diluted in growth media. In addition, plasma was heat treated for 30 minutes at 37° C. prior to use. The antibody/virus mixture was added to confluent Vero E6/TMPRSS2 cells that were plated at 30,000 cells per well the day prior in 96-well plates. The cells were incubated for 3 days at 37° C. and then fixed and stained with 20% methanol and crystal violet solution. Virus neutralization titers were determined as the reciprocal of the highest serum dilution that completely prevented cytopathic effects. The 50% inhibitory concentrations for mAbs (IC50) was determined using log (inhibitor) versus normalized response (variable slope) performed by Prism (Graphpad Version 9.0). All plasma and mAbs were tested in duplicate and each experiment was performed twice.

### 6. Enzyme-Linked Immunosorbent Assay (ELISA)

[0414] High-protein binding microtiter plates (Costar) were coated with 50 μl of recombinant proteins (either full-length spike or RBD) at 2 μg/ml in 1×PBS solution overnight at 4° C. The plates were washed 3 times the next day with 1×PBS supplemented with 0.05% Tween 20 and blocked with 175 μl of 1×PBS containing 20% FBS for 1 hour at 37° C. MAbs were serially diluted 1:3 starting at 10 μg/ml and incubated for 1 hour at 37° C. The plates were then washed 3 times and incubated with horseradish peroxidase (HRP)-conjugated goat anti-human IgG antibody (Jackson ImmunoResearch) diluted 1:1000 for 1 hour at 37° C., and plates were subsequently developed with Super AquaBlue ELISA substrate (eBioscience). Absorbance was measured at 405 nm on a microplate spectrophotometer (Bio-Rad). To standardize the assays, control antibodies with known binding characteristics were included on each plate and the plates were developed when the absorbance of the control reached 3.0 OD405 units. All mAbs were tested in duplicate and each experiment was performed twice.

### 7. Competition ELISAs

[0415] To determine the classification of certain mAbs, competition ELISAs were carried out using the mAbs with known epitope binding property as competitor mAbs. The competitor mAbs were biotinylated overnight at 4° C. with EZ-Link™ Sulfo-NHS-Biotin (Thermo Scientific). The excess free biotin of biotinylated mAbs were removed by 7k MWCO Zeba™ spin desalted columns (Thermo Scientific). Plates were coated with 50 μl of 2 μg/ml RBD antigen overnight at 4° C. After 1 hour of blocking the plates with PBS 20% FBS, the 2-fold dilution of undetermined classmAbs or serum were added (starting at 20 μg/ml of mAbs and 1:50 of serum) into coated well. After incubated for 2 hours at room temperature, biotinylated competitor mAb was added at a concentration of 2× K_{d} and incubated another 2 hours at room temperature together with mAbs or serum that were previously added. The plates were washed 3 times and incubated with 100 μl HRP-conjugated streptavidin (Southern Biotech) dilution of 1:1000 for 1 hour at 37° C. The plates were developed with Super AquaBlue ELISA substrate (eBioscience). To standardize the assays, competitor biotinylated mAb was added in well that without any competing mAbs or serum as control well. The data were recorded when the absorbance of the control well reached 1 to 1.5 OD405 units. All mAbs were tested in duplicate and each experiment was performed twice. The percent competition was then calculated by dividing a sample's observe OD by the OD reached by the positive control, subtracting this value from 1, and multiplying by 100. For the serum data, ODs were log transformed and analyzed by non-linear regression to determine EC50 values using Prism software (Graphpad Version 9.0).

### 8. Biolayer Interferometry (BLI)

[0416] To determine the classification of certain mAbs, competition assays were performed using the mAbs with known epitope binding property as competitor mAbs with mAb binding unknown epitopes using BLI with a Octet K2 instrument (Forte Bio). The RBD of SARS-CoV-2 was biotinylated, desalted and loaded at a concentration of 10 μg/ml onto streptavidin probes for 300 seconds followed by PBS for 60 seconds. The probe was moved to associate with mAbs of interest (10 μg/ml) for 300 seconds followed by PBS for 60 seconds and then associations with control mAbs (10 μg/mL) for 300 seconds. The final volume for all the solutions was 200 ml/well. All of the assays were performed with PBS buffer at 30° C.

### 9. SARS-CoV-2 Spike and RBD Protein Models

[0417] FL mutations were visualized on the WT spike protein (PDB: 7KJ2) using PyMOL (Schrödinger). The model of RBD mutations and RBD classes were visualized on the WT RBD protein (PDB: 7KDL) using PyMOL (Schrödinger). The models were further processed by Adobe Illustrator 2021 and Adobe Photoshop.

### 10. Statistical Analysis

[0418] All statistical analyses were performed using Prism software (Graphpad Version 9.0). Sample sizes (n) for the number of mAbs tested are indicated in corresponding figures or in the center of pie graphs. Number of biological repeats for experiments and specific tests for statistical significance used are indicated in the corresponding figure legends. P values less than or equal to 0.05 were considered significant. * P≤0.05, ** P≤0.01, *** P≤0.001, **** P<0.0001.

### D. Tables

SUPPLEMENTARY TABLE 1
COVID-19 convalescent subjects. Responder group and
Severity were categorized by previous study²⁶.

| | | | | | Symptom | | |
|---|---|---|---|---|---|---|---|
| | | | SARS- | Duration of | start to | | |
| Subject | | | CoV-2 | symptoms | donation | Responder | Severity |
| ID | Age | Sex | PCR Test | (days) | (days) | Category26 | Category26 |
| 24 | 34 | M | Mar. 23, 2020 | 12 | 41 | High | Severe |
| 20 | 31 | M | Mar. 31, 2020 | 19 | 48 | High | Critical |
| 564 | 24 | F | Mar. 19, 2020 | 32 | 60 | Low | Severe |
| 144 | 56 | M | Mar. 16, 2020 | 23 | 54 | Low | Moderate |
| 305 | 43 | F | Apr. 17, 2020 | 4 | 47 | Low | Moderate |
| 166 | 42 | F | Mar. 25, 2020 | 17 | 55 | Low | Moderate |
| 210 | 47 | M | Apr. 4, 2020 | 7 | 41 | Low | Moderate |
| 451 | 46 | M | Apr. 4, 2020 | 11 | 49 | High | Severe |
| | | | | | | | (hospitalized) |
| 626 | 44 | M | Mar. 31, 2020 | 19 | 56 | High | Moderate |
| 728 | 62 | F | Mar. 15, 2020 | 53 | 130 | High | Severe |

SUPPLEMENTARY TABLE 2
Characteristics of SARS-CoV-2 spike binding mAbs. Cross-neutralizing
mAbs against WT, B.1.1.7 and P.1 or B.1.617.2 are bolded.

| mAb | Epitope | | | # VH | #VL | CDRH3 | CDRL3 |
|---|---|---|---|---|---|---|---|
| ID | specificity | VH gene | VL gene | SHM | SHM | length | length |
| S20-58 | Spike RBD | IGHV4- | IGKV2- | 5 | 2 | 15 | 9 |
| | Class 2 | 30-4*08 | 24*01 | | | | |
| S20-74 | Spike RBD | IGHV4- | IGLV2- | 7 | 3 | 15 | 11 |
| | Class 3-like | 59*11 | 8*01 | | | | |
| S24- | Spike RBD | IGHV2- | IGLV2- | 1 | 3 | 11 | 11 |
| 223 | undetermined | 5*02 | 14*01 | | | | |
| S24- | Spike RBD | IGHV2- | IGKV1- | 3 | 0 | 16 | 9 |
| 821 | Class 3 | 70*15 | 5*03 | | | | |
| S24- | Spike RBD | IGHV1- | IGLV7- | 0 | 0 | 15 | 8 |
| 902 | undetermined | 69*04 | 46*01 | | | | |
| S24- | Spike RBD | IGHV3- | IGKV1- | 4 | 5 | 25 | 9 |
| 1002 | Class 2 | 30-3*01 | 13*02 | | | | |
| S24- | Spike RBD | IGHV1- | IGLV1- | 8 | 7 | 20 | 11 |
| 1224 | Class 2 | 46*01 | 40*01 | | | | |
| S24- | Spike RBD | IGHV3- | IGLV3- | 7 | 6 | 22 | 9 |
| 1271 | undetermined | 66*01 | 1*01 | | | | |
| S24- | Spike | IGHV1- | IGLV10- | 6 | 4 | 18 | 11 |
| 1301 | NTD-B | 24*01 | 54*01 | | | | |
| S24- | Spike RBD | IGHV3- | IGLV3- | 3 | 4 | 17 | 12 |
| 1384 | Class 4 | 48*04 | 21*02 | | | | |
| S24- | Spike RBD | IGHV3- | IGKV3- | 3 | 0 | 18 | 8 |
| 1476 | Class 2 | 49*03 | 15*01 | | | | |
| S144- | Spike RBD | IGHV5- | IGLV1- | 8 | 5 | 17 | 12 |
| 67 | Class 3-like | 51*01 | 40*01 | | | | |
| S144- | Spike RBD | IGHV5- | IGKV1- | 3 | 3 | 11 | 8 |
| 69 | Class 4 | 51*01 | 5*01 | | | | |
| S144- | Spike RBD | IGHV5- | IGKV1- | 7 | 6 | 11 | 9 |
| 466 | Class 4 | 51*01 | 5*01 | | | | |
| S144- | Spike RBD | IGHV5- | IGKV1- | 3 | 1 | 12 | 9 |
| 509 | Class 4 | 51*01 | 5*01 | | | | |
| S144- | Spike RBD | IGHV1- | IGKV3- | 9 | 3 | 19 | 9 |
| 1079 | Class 2 | 69*02 | 20*01 | | | | |
| S144- | Spike RBD | IGHV1- | IGLV2- | 15 | 5 | 18 | 11 |
| 1339 | Class 2 | 2*06 | 14*01 | | | | |
| S144- | Spike RBD | IGHV1- | IGKV1- | 4 | 0 | 11 | 17 |
| 1406 | Class 2 | 3*01 | 5*01 | | | | |
| S144- | Spike RBD | IGHV1- | IGKV1- | 9 | 2 | 12 | 10 |
| 1407 | Class 2 | 69*02 | 5*01 | | | | |
| S144- | Spike RBD | IGHV3- | IGKV1- | 2 | 3 | 13 | 9 |
| 1850 | undetermined | 23*04 | 5*01 | | | | |
| S166- | Spike | IGHV3- | IGKV1- | 10 | 2 | 19 | 8 |
| 32 | NTD-B | 11*01 | 5*01 | | | | |
| S166- | Spike | IGHV4- | IGLV3- | 3 | 5 | 16 | 12 |
| 2395 | NTD-B | 4*07 | 21*02 | | | | |
| S210- | Spike | IGHV4- | IGLV4- | 11 | 4 | 10 | 9 |
| 1262 | NTD-A | 39*01 | 69*01 | | | | |
| S305- | Spike RBD | IGHV3- | IGKV3- | 18 | 8 | 6 | 9 |
| 223 | Class 2 | 33*06 | 11*01 | | | | |
| S305- | Spike RBD | IGHV1- | IGKV3- | 4 | 4 | 18 | 9 |
| 399 | undetermined | 24*01 | 15*01 | | | | |
| S305- | Spike | IGHV1- | IGKV3- | 3 | 3 | 20 | 9 |
| 1456 | NTD-B | 24*01 | 15*01 | | | | |
| S451- | Spike | IGHV3- | IGKV3D- | 8 | 3 | 15 | 8 |
| 11 | NTD-A | 23*01 | 20*01 | | | | |
| S451- | Spike | IGHV4- | IGKV3- | 10 | 1 | 15 | 10 |
| 337 | NTD-B | 59*01 | 20*01 | | | | |
| S451- | Spike S2 | IGHV3- | IGKV3- | 6 | 4 | 14 | 8 |
| 650 | | 30*01 | 20*01 | | | | |
| S451- | Spike | IGHV4- | IGLV2- | 9 | 5 | 14 | 10 |
| 1451 | NTD-A | 31*01 | 11*01 | | | | |
| S451- | Spike | IGHV2- | IGLV2- | 8 | 5 | 20 | 11 |
| 1522 | NTD-B | 26*01 | 14*01 | | | | |
| S564- | Spike RBD | IGHV3- | IGLV3- | 6 | 3 | 18 | 12 |
| 14 | Class 3-like | 7*01 | 21*04 | | | | |
| S564- | Spike RBD | IGHV1- | IGLV2- | 6 | 2 | 15 | 10 |
| 68 | Class 2 | 2*02 | 8*01 | | | | |
| S564- | Spike RBD | IGHV1- | IGLV2- | 2 | 6 | 15 | 10 |
| 134 | Class 2 | 2*02 | 8*01 | | | | |
| S564- | Spike RBD | IGHV1- | IGLV2- | 10 | 1 | 18 | 10 |
| 138 | Class 2 | 2*02 | 14*01 | | | | |
| S564- | Spike RBD | IGHV3- | IGKV1- | 4 | 4 | 20 | 10 |
| 152 | Class 4 | 33*06 | 33*01 | | | | |
| S564- | Spike RBD | IGHV1- | IGLV2- | 4 | 3 | 15 | 10 |
| 265 | Class 2 | 2*02 | 8*01 | | | | |
| S626-8 | Spike S2 | IGHV1- | IGLV3- | 7 | 5 | 24 | 12 |
| | | 8*01 | 19*01 | | | | |
| S626- | Spike RBD | IGHV3- | IGLV1- | 18 | 3 | 16 | 11 |
| 362 | undetermined | 48*01 | 40*01 | | | | |
| S626- | Spike RBD | IGHV1- | IGLV1- | 6 | 4 | 17 | 11 |
| 651 | Class 3-like | 69*04 | 40*01 | | | | |
| S626- | Spike RBD | IGHV3- | IGKV1- | 6 | 6 | 22 | 10 |
| 747 | Class 3-like | 9*01 | 33*01 | | | | |
| S728- | Spike | IGHV1- | IGKV3- | 17 | 3 | 16 | 11 |
| 1981 | NTD-A | 46*01 | 11*01 | | | | |
| S728- | Spike | IGHV1- | IGLV2- | 14 | 12 | 17 | 10 |
| 2036 | NTD-A | 2*02 | 23*02 | | | | |

SUPPLEMENTARY TABLE 3
Antigen information and source. VOC refers to variant
of concern and VUM refers to variant under monitoring.

| | | | | | Mutation | |
|---|---|---|---|---|---|---|
| Antigen | S1 NTD | RBD | S1 CTD | S2 | detected in | Source |
| Spike FL, 2-P, trimer | | | | | | |
| WT | — | — | — | — | — | In-house |
| D614G | — | — | D614G | — | VOC | In-house |
| B.1.1.7 (alpha) | H69del, | N501Y | A570D, | T716I, | VOC | Sather lab |
| | V70del, | | D614G, | S982A, | | |
| | Y144del | | P681H | D1118H | | |
| B.1.351 (beta) | L18F, | K417N, | D614G | A701V | VOC | Sather lab |
| | D80A, | E484K. | | | | |
| | D215G, | N501Y | | | | |
| | del241-243, | | | | | |
| | R246I | | | | | |
| P.1 (gamma) | L18F, | K417T, | D614G, | T1027I, | VOC | Sather lab |
| | T20N, | E484K, | H655Y | V1176F | | |
| | P26S, | N501Y | | | | |
| | D138Y, | | | | | |
| | R190S | | | | | |
| B.1.617.2 (delta) | T19R, | L452R, | D614G, | D950N | VOC | Sather lab |
| | G142D, | T478K, | P681R | | | |
| | del156-157, | | | | | |
| | R158G | | | | | |
| B.1.526 (iota) | L5F, T95I, | E484K | D614G | A701V | VUM | Sather lab |
| | D253G | | | | | |
| B.1.617.1 | T95I, | L452R, | D614G, | Q1071H | VUM | Sather lab |
| (kappa) | G142D, | E484Q | P681R | | | |
| | E154K | | | | | |
| S1 monomeric | | | | | | |
| WT | — | — | — | — | — | SinoBiological |
| S2 monomeric | | | | | | |
| WT | — | — | — | — | — | SinoBiological |
| RBD | | | | | | |
| WT | — | — | — | — | — | In-house |
| E406Q | — | E406Q | — | — | Circulating | Krammer lab |
| | | | | | variant, In vitro | |
| | | | | | escape | |
| K417N | — | K417N | — | — | VOC, In vitro | SinoBiological |
| (B.1.351) | | | | | escape | |
| K417T (P.1) | — | K417T | — | — | VOC, In vitro | In-house |
| | | | | | escape | |
| K417E | — | K417E | — | — | In vitro escape | Krammer lab |
| K417V | — | K417V | — | — | In vitro escape | Krammer lab |
| K417A | — | K417A | — | — | RBD-ACE2 | In-house |
| | | | | | contacting | |
| Y453F (B.1.427, | — | Y453F | — | — | VOC, In vitro | Krammer lab |
| B.1.429) | | | | | escape | |
| F486A | — | F486A | — | — | In vitro escape | Krammer lab |
| N487R | — | N487R | — | — | In vitro escape | Krammer lab |
| E484K (P.1, | — | E484K | — | — | VOC, In vitro | Krammer lab |
| B.1.526, | | | | | escape | |
| B.1.351, | | | | | | |
| B.1.1.318, | | | | | | |
| B.1.525, R.1, | | | | | | |
| B.1.526.2, B.1.1, | | | | | | |
| B.1.621, B.1, | | | | | | |
| B.1.1.7) | | | | | | |
| F490K | — | F490K | — | — | In vitro escape | Krammer lab |
| Q493R | — | Q493R | — | — | In vitro escape | Krammer lab |
| N439K | — | N439K | — | — | VOC, In vitro | Krammer lab |
| | | | | | escape | |
| N440K (B.1.36) | — | N440K | — | — | Circulating | Krammer lab |
| | | | | | variant, In vitro | |
| | | | | | escape | |
| L452R | — | L452R | — | — | VOC, In vitro | SinoBiological |
| (B.1.526.1, | | | | | | |
| B.1.429, | | | | | | |
| B.1.427, | | | | | escape | |
| B.1.617.2, B.1, | | | | | | |
| B.1.617.1, C.36, | | | | | | |
| A.2.5) | | | | | | |
| N501Y (B.1.1.7) | — | N501Y | — | — | VOC | Krammer lab |
| N501Q | — | N501Q | — | — | RBD-ACE2 | Krammer lab |
| | | | | | contacting | |
| N501A | — | N501A | — | — | RBD-ACE2 | Krammer lab |
| | | | | | contacting | |
| B.1.351 | | K417N, | | | VOC | Krammer lab |
| | | E484K, | | | | |
| | | N501Y | | | | |
| P.1 | K417T, | | | | VOC | Krammer lab |
| | E484K, | | | | | |
| | N501Y | | | | | |

| Other coronaviruses | | |
|---|---|---|
| SARS-CoV-1 RBD WT | — | In-house |
| MERS-CoV RBD WT | — | In-house |

SUPPLEMENTARY TABLE 4
SARS-CoV-2 virus information and source.

| Antigen | S1 NTD | RBD | S1 CTD | S2 | Source |
|---|---|---|---|---|---|
| WT | — | — | — | — | SARS-CoV-2/UT- |
| | | | | | NCGM02/Human/2020/Tokyo |
| | | | | | from BEI |
| B.1.1.7 | L5F, H69del, | N501Y | A570D, | T716I, | hCoV- |
| | V70del, | | D614G, | S982A, | 19/Japan/QHN001/2020 from |
| | Y144del | | P681H | D1118H | BEI |
| P.1 | L18F, T20N, | K417T, | D614G, | T1027I, | hCoV-19/Japan/TY7- |
| | P26S, D138Y, | E484K, | H655Y | V1176F | 501/2021 from BEI |
| | G181V, R190S | N501Y | | | |
| B.1.617.1 | G142D, E154K | L452R, | D614G, | Q1071H, | hCoV-19/USA/CA-Stanford- |
| | | E484Q | P681R | H1101D | 15_S02/2021 from BEI |
| B.1.617.2 | T19R, T95I, | L452R, | D614G, | D950N | hCoV-19/USA/WI-UW- |
| | G142D, E156G, | T478K | P681R | | 5250/2021 |
| | F157del, | | | | |
| | R158del | | | | |

### E. References

[0419] The following references and the references cited throughout the specification, to the extent that they provide exemplary procedural or other details supplementary to those set forth herein, are specifically incorporated herein by reference.
[0420] 1. Baden, L. R. et al. Efficacy and Safety of the mRNA-1273 SARS-CoV-2 Vaccine. New Engl J Med 384, 403-416, doi: 10.1056/NEJMoa2035389 (2021).
[0421] 2. Garcia-Beltran, W. F. et al. Multiple SARS-CoV-2 variants escape neutralization by vaccine-induced humoral immunity. Cell, doi: 10.1016/j.cell.2021.03.013 (2021).
[0422] 3. Wang, Z. J. et al. mRNA vaccine-elicited antibodies to SARS-CoV-2 and circulating variants. Nature, doi: 10.1038/s41586-021-03324-6 (2021).
[0423] 4. Wall, E. C. et al. Neutralising antibody activity against SARS-CoV-2 VOCs B. 1.617. 2 and B. 1.351 by BNT162b2 vaccination. The Lancet 397, 2331-2333 (2021).
[0424] 5. Jiang, S. B., Hillyer, C. & Du, L. Y. Neutralizing Antibodies against SARS-CoV-2 and Other Human Coronaviruses. Trends Immunol 41, 355-359, doi: 10.1016/j.it.2020.03.007 (2020).
[0425] 6. Korber, B. et al. Tracking Changes in SARS-CoV-2 Spike: Evidence that D614G Increases Infectivity of the COVID-19 Virus. Cell 182, 812-+, doi: 10.1016/j.cell.2020.06.043 (2020).
[0426] 7. Leung, K., Shum, M. H., Leung, G. M., Lam, T. T. & Wu, J. T. Early transmissibility assessment of the N501Y mutant strains of SARS-CoV-2 in the United Kingdom, October to November 2020. Eurosurveillance 26, 2002106 (2021).
[0427] 8. Liu, H. et al. The basis of a more contagious 501Y.V1 variant of SARS-CoV-2. Cell Res, doi: 10.1038/s41422-021-00496-8 (2021).
[0428] 9. Volz, E. et al. Assessing transmissibility of SARS-CoV-2 lineage B. 1.1. 7 in England. Nature 593, 266-269 (2021).
[0429] 10. Davies, N. G. et al. Estimated transmissibility and impact of SARS-CoV-2 lineage B. 1.1. 7 in England. Science 372 (2021).
[0430] 11. Annavajhala, M. K. et al. A Novel SARS-CoV-2 Variant of Concern, B.1.526, Identified in New York. medRxiv, doi: 10.1101/2021.02.23.21252259 (2021).
[0431] 12. Nonaka, C. K. V. et al. Genomic Evidence of SARS-CoV-2 Reinfection Involving E484K Spike Mutation, Brazil. Emerg Infect Dis 27, doi: 10.3201/eid2705.210191 (2021).
[0432] 13. Tegally, H. et al. Sixteen novel lineages of SARS-CoV-2 in South Africa. Nat Med 27, 440-+, doi: 10.1038/s41591-021-01255-3 (2021).
[0433] 14. Hirotsu, Y. & Omata, M. Detection of R.1 lineage severe acute respiratory syndrome coronavirus 2 (SARS-CoV-2) with spike protein W152L/E484K/G769V mutations in Japan. PLOS Pathog 17, e1009619, doi: 10.1371/journal.ppat. 1009619 (2021).
[0434] 15. Edara, V.-V. et al. Infection and vaccine-induced neutralizing antibody responses to the SARS-CoV-2 B. 1.617. 1 variant. bioRxiv (2021).
[0435] 16. Shang, J. et al. Structural basis of receptor recognition by SARS-CoV-2. Nature 581, 221-+, doi: 10.1038/s41586-020-2179-y (2020).
[0436] 17. Yuan, M., Liu, H. J., Wu, N. I. C. & Wilson, I. A. Recognition of the SARS-CoV-2 receptor binding domain by neutralizing antibodies. Biochem Bioph Res Co 538, 192-203, doi: 10.1016/j.bbrc.2020.10.012 (2021).
[0437] 18. Zhou, D. et al. Evidence of escape of SARS-CoV-2 variant B.1.351 from natural and vaccine-induced sera. Cell, doi: 10.1016/j.cell.2021.02.037 (2021).
[0438] 19 Plante, J. A. et al. The variant gambit: COVID-19's next move. Cell Host Microbe 29, 508-515, doi: 10.1016/j.chom.2021.02.020 (2021).
[0439] 20 Yadav, P. D. et al. Neutralization of variant under investigation B.1.617 with sera of BBV152 vaccinees. Clin Infect Dis, doi: 10.1093/cid/ciab411 (2021).
[0440] 21. Singh, J., Rahman, S. A., Ehtesham, N. Z., Hira, S. & Hasnain, S. E. SARS-CoV-2 variants of concern are emerging in India. Nat Med, 1-3 (2021).
[0441] 22. Organization, W. H. COVID-19 weekly epidemiological update, edition 43, 8 Jun. 2021. (2021).
[0442] 23. Bernal, J. L. et al. Effectiveness of COVID-19 vaccines against the B. 1.617. 2 variant. medRxiv (2021).
[0443] 24 Saito, A. et al. SARS-CoV-2 spike P681R mutation enhances and accelerates viral fusion. bioRxiv (2021).
[0444] 25. Bugembe, D. L. et al. A SARS-CoV-2 lineage A variant (A. 23.1) with altered spike has emerged and is dominating the current Uganda epidemic. MedRxiv (2021).
[0445] 26. Guthmiller, J. J. et al. SARS-CoV-2 Infection Severity Is Linked to Superior Humoral Immunity against the Spike. Mbio 12, doi:ARTN e02940-20 10.1128/mBio.02940-20 (2021).
[0446] 27 Dugan, H. L. et al. Profiling B cell immunodominance after SARS-CoV-2 infection reveals antibody evolution to non-neutralizing viral targets. Immunity (2021).
[0447] 28. Ju, B. et al. Human neutralizing antibodies elicited by SARS-CoV-2 infection. Nature 584, 115-+, doi: 10.1038/s41586-020-2380-z (2020).
[0448] 29 Zost, S. J. et al. Potently neutralizing and protective human antibodies against SARS-CoV-2. Nature 584, 443-449, doi: 10.1038/s41586-020-2548-6 (2020).
[0449] 30. Greaney, A. J. et al. Mutational escape from the polyclonal antibody response to SARS-CoV-2 infection is largely shaped by a single class of antibodies. bioRxiv, doi: 10.1101/2021.03.17.435863 (2021).
[0450] 31. Starr, T. N. et al. Prospective mapping of viral mutations that escape antibodies used to treat COVID-19. Science 371, 850-+, doi: 10.1126/science.abf9302 (2021).
[0451] 32. Greaney, A. J. et al. Complete Mapping of Mutations to the SARS-CoV-2 Spike Receptor-Binding Domain that Escape Antibody Recognition. Cell Host Microbe 29, 44-57 e49, doi: 10.1016/j.chom.2020.11.007 (2021).
[0452] 33 Lan, J. et al. Structure of the SARS-CoV-2 spike receptor-binding domain bound to the ACE2 receptor. Nature 581, 215-220, doi: 10.1038/s41586-020-2180-5 (2020).
[0453] 34. Starr, T. N. et al. Deep Mutational Scanning of SARS-CoV-2 Receptor Binding Domain Reveals Constraints on Folding and ACE2 Binding. Cell 182, 1295-+, doi: 10.1016/j.cell.2020.08.012 (2020).
[0454] 35. Weisblum, Y. et al. Escape from neutralizing antibodies by SARS-CoV-2 spike protein variants. Elife 9, doi:ARTN e61312 10.7554/eLife.61312 (2020).
[0455] 36. Barnes, C. O. et al. SARS-CoV-2 neutralizing antibody structures inform therapeutic strategies. Nature 588, 682-+, doi: 10.1038/s41586-020-2852-1 (2020).
[0456] 37 Yuan, M. et al. Structural basis of a shared antibody response to SARS-CoV-2. Science 369, 1119-+, doi: 10.1126/science.abd2321 (2020).
[0457] 38. Yuan, M., Liu, H., Wu, N. C. & Wilson, I. A. Recognition of the SARS-CoV-2 receptor binding domain by neutralizing antibodies. Biochem Biophys Res Commun 538, 192-203, doi: 10.1016/j.bbrc.2020.10.012 (2021).
[0458] 39 Cherian, S. et al. Convergent evolution of SARS-CoV-2 spike mutations, L452R, E484Q and P681R, in the second wave of COVID-19 in Maharashtra, India. BioRxiv (2021).
[0459] 40 Thomson, E. C. et al. Circulating SARS-CoV-2 spike N439K variants maintain fitness while evading antibody-mediated immunity. Cell 184, 1171-+, doi: 10.1016/j.cell.2021.01.037 (2021).
[0460] 41. Deng, X. et al. Transmission, infectivity, and antibody neutralization of an emerging SARS-CoV-2 variant in California carrying a L452R spike protein mutation. medRxiv, doi: 10.1101/2021.03.07.21252647 (2021).
[0461] 42. Galson, J. D. et al. Deep Sequencing of B Cell Receptor Repertoires From COVID-19 Patients Reveals Strong Convergent Immune Signatures. Front Immunol 11, 605170, doi: 10.3389/fimmu.2020.605170 (2020).
[0462] 43 Robbiani, D. F. et al. Convergent antibody responses to SARS-CoV-2 in convalescent individuals. Nature 584, 437-+, doi: 10.1038/s41586-020-2456-9 (2020).
[0463] 44. Schmitz, A. J. et al. A public vaccine-induced human antibody protects against SARS-CoV-2 and emerging variants. bioRxiv, doi: 10.1101/2021.03.24.436864 (2021).
[0464] 45 Faria, N. R. et al. Genomics and epidemiology of the P.1 SARS-CoV-2 lineage in Manaus, Brazil. Science, doi: 10.1126/science.abh2644 (2021).
[0465] 46 Amanat, F. et al. SARS-CoV-2 mRNA vaccination induces functionally diverse antibodies to NTD, RBD and S2. Cell (2021).
[0466] 47 Chi, X. et al. A neutralizing human antibody binds to the N-terminal domain of the Spike protein of SARS-CoV-2. Science 369, 650-655, doi: 10.1126/science.abc6952 (2020).
[0467] 48. Ng, K. W. et al. Preexisting and de novo humoral immunity to SARS-CoV-2 in humans. Science 370, 1339-1343, doi: 10.1126/science.abe1107 (2020).
[0468] 49. Shrock, E. et al. Viral epitope profiling of COVID-19 patients reveals cross-reactivity and correlates of severity. Science 370, doi: 10.1126/science.abd4250 (2020).
[0469] 50. Chan, C. E. Z. et al. The Fc-mediated effector functions of a potent SARS-CoV-2 neutralizing antibody, SC31, isolated from an early convalescent COVID-19 patient, are essential for the optimal therapeutic efficacy of the antibody. PLOS One 16, e0253487, doi: 10.1371/journal.pone.0253487 (2021).
[0470] 51. Cao, Y. L. et al. Potent Neutralizing Antibodies against SARS-CoV-2 Identified by High-Throughput Single-Cell Sequencing of Convalescent Patients' B Cells. Cell 182, 73-+, doi: 10.1016/j.cell.2020.05.025 (2020).
[0471] 52. Stuart, T. et al. Comprehensive Integration of Single-Cell Data. Cell 177, 1888-1902 e1821, doi: 10.1016/j.cell.2019.05.031 (2019).
[0472] 53. Ye, J., Ma, N., Madden, T. L. & Ostell, J. M. IgBLAST: an immunoglobulin variable domain sequence analysis tool. Nucleic Acids Res 41, W34-40, doi: 10.1093/nar/gkt382 (2013).
[0473] 54. Guthmiller, J. J., Dugan, H. L., Neu, K. E., Lan, L. Y. & Wilson, P. C. An Efficient Method to Generate Monoclonal Antibodies from Human B Cells. Methods Mol Biol 1904, 109-145, doi: 10.1007/978-1-4939-8958-4_5 (2019).

### Example 2: A Broadly Protective Antibody to Emerging SARS-CoV-2 Variants Binds an Epitope More Readily Accessible on Hexaproline Spike Antigen Constructs

[0474] The rapid evolution of SARS-CoV-2 Omicron variants has emphasized the need to identify antibodies with broad neutralizing capabilities to inform future monoclonal therapies and vaccination strategies. Herein, the inventors identify S728-1157, a broadly neutralizing antibody (bnAb) targeting the receptor-binding site (RBS) and derived from an individual previously infected with SARS-CoV-2 prior to the spread of variants of concern (VOCs). S728-1157 demonstrates broad cross-neutralization of all dominant variants including D614G, Beta, Delta, Kappa, Mu, and Omicron (BA.1/BA.2/BA.2.75/BA.4/BA.5). Furthermore, it protected hamsters against in vivo challenges with wildtype, Delta, and BA.1 viruses. Structural analysis reveals that this antibody targets a class 1 epitope via multiple hydrophobic and polar interactions with its CDR-H3, in addition to common class 1 motifs in CDR-H1/CDR-H2. Importantly, this epitope is more readily accessible in the open and prefusion state, or in the hexaproline (6P)-stabilized spike constructs, as compared to diproline (2P) constructs. Overall, S728-1157 demonstrates broad therapeutic potential, and may inform target-driven vaccine design against future SARS-CoV-2 variants.

### A. Introduction

[0475] Since the start of the pandemic in December 2019, the severe acute respiratory syndrome coronavirus 2 (SARS-CoV-2) virus has led to over 576 million cases of coronavirus disease 2019 (COVID-19) and over six million deaths globally. Although the rapid development and distribution of vaccines and therapeutics has curbed the impact of COVID-19 to an extent, the emergence of circulating variants of concern (VOCs) continues to represent a major threat due to the potential for further immune evasion and enhanced pathogenicity. The D614G variant was the earliest variant to emerge and became universally prevalent thereafter. In comparison to wildtype (WT), the D614G variant exhibited increased transmissibility rather than increased pathogenicity and was therefore unlikely to reduce efficacy of vaccines in clinical trials (1). Between the emergence D614G and October 2021, four additional significant VOC evolved worldwide, including Alpha, Beta, Gamma, and Delta. Among these variants, Delta became a serious global threat as a result of its transmissibility, increased disease severity, and partial immune evasion as shown by the reduced ability of polyclonal serum and monoclonal antibodies (mAbs) to neutralize this strain (2-6). Shortly afterwards, in November 2021, the Omicron variant was identified and announced as a novel VOC. This variant possessed the largest number of mutations to date and appeared to spread more rapidly than previous strains (7,8). Currently, there are five major subvariant lineages of Omicron (BA.1, BA.2, BA.3, BA.4 and BA.5) leading to new COVID-19 cases, with BA.5 becoming dominant over BA.2 and accounting for most new cases in the United States at the time of writing. The Omicron variants can escape recognition by COVID-19 vaccine-associated immunity to varying extents, thereby significantly reducing the neutralizing potency of serum antibodies from convalescent and fully mRNA-vaccinated individuals (9). Similarly, Omicron variants were able to escape binding of several Emergency Use-Authorization (EUA) therapeutic mAbs even though these had been previously shown to be effective against earlier VOCs (10,11). Due to the lowered neutralization against Omicron and the continued threat of future VOCs, there is an urgent need to identify broad and potent neutralizing antibodies that can protect against diverse evolving SARS-CoV-2 lineages.

[0476] In this study, the inventors identify a potent RBD-reactive monoclonal antibody from the peripheral blood of SARS-CoV-2 convalescent individual that effectively neutralize Alpha, Beta, Kappa, Delta, Mu, and Omicron variants (BA.1, BA.2, BA.2.75, BA.4 and BA.5). This mAb, S728-1157, entirely abrogated BA.1 Omicron replication in vivo and significantly reduced viral loads during wildtype and Delta infection. In terms of specificity, S728-1157 bound the receptor binding site (RBS) that is fully exposed when the RBD on the spike is in the up conformation. S728-1157 binds using motifs found in the CDR-H1 and CDR-H2 domains that are common to IGHV3-53/3-66 class 1 antibodies but also via extensive unique contacts with CDR-H3 to circumvent mutations in the variant virus spikes. This suggests that the rational design of future vaccine boosts covering Omicron variants should be modified to present stabilized spike in the up configuration to optimally induce class 1 mAbs that have similar CDR-H3 features.

### B. Results

1. Isolation of RBD-Reactive mAbs that Exhibit Diverse Patterns of Neutralization and Potency

[0477] Before the spread of the Omicron variant, the inventors previously characterized 43 mAbs targeting distinct epitopes on the spike protein, including the N-terminal domain (NTD), RBD, and subunit 2 (S2), although none were able to neutralize all existing SARS-CoV-2 variants at that time (12). In the current study, an additional panel of RBD-reactive mAbs were expressed from three high-responder subjects who mounted robust anti-spike IgG responses, as defined previously (Table S1 and Table S2) (13). Although the proportion of spike RBD-binding B cells was similar in high-responders as compared to mid- and low-responders (FIG. 8a-c), heavy chain somatic hypermutation rates were significantly greater in the high-responder group (FIG. 8d), suggesting that these subjects may have the highest potential to generate potent cross-reactive mAbs (13). These antibodies were assayed for binding to key RBD mutants to identify their epitope classifications (Table S3) (14). Among 14 RBD-reactive mAbs, the inventors identified four class 2 mAbs, two class 3 mAbs, and eight unclassified mAbs that showed little to no reduction of binding against any key RBD mutants tested (FIG. 8f). Class 2 and 3 RBD mAbs did not recognize a multivariant RBD mutant containing K417N/E484K/L452R/N501Y substitutions, an artificially designed RBD to include the key mutations for virus escape (14,15), nor cross-reactivity to the RBD of SARS-CoV-1 and Middle Eastern respiratory syndrome (MERS)-CoV (FIG. 8f). Functionally, class 2 and 3 RBD mAbs potently neutralized D614G and Delta but neutralizing activity was limited against Beta, Kappa and Mu (FIG. 8g). No class 2 or 3 antibodies assayed could neutralize any tested Omicron variant.

[0478] In contrast, the majority of unclassified mAbs bound to the RBD multivariant and cross-reacted to the SARS-CoV-1 RBD (FIG. 8f). Among these, the inventors went on to identify three bnAbs, S451-1140, S626-161 and S728-1157, that showed high neutralization potency against D614G and could cross-neutralize Beta, Delta, Kappa, Mu and BA.1 with 99% inhibitory concentration (IC99) in the range of 20-2500 ng/ml (FIG. 8g). Given the broad neutralization potency of these three mAbs, in addition of plaque assay platform, the inventors also performed the neutralization activity against authentic BA.4, BA.5 and BA.2.75 viruses using focus reduction neutralization test (FRNT) (FIG. 8g). Of these, S728-1157 displayed high neutralizing activities against the panel of Omicron variants including BA.1, BA.2, BA.4 and BA.5, with IC99 below 100 ng/ml as measured by plaque assay. A similar scenario was observed using FRNT, S728-1157 maintains its extremely high neutralization activity against BA.2.75, BA.4 and BA.5 with 50% inhibitory concentration (IC50) in the range of 8-16 ng/ml (FIG. 8g). S451-1140 neutralized BA.1 and BA.2 potently, but not BA.4 and BA.5 as observed in both neutralization assay platforms. On the other hand, S626-161 did not demonstrate neutralizing activity against Omicron variants beyond the BA.1 variant (FIG. 8g). Although S626-161 had a lower neutralization potency against VOC than the other two, it was the only mAb which showed cross-reactivity to SARS-CoV-1 RBD and was able to neutralize bat coronaviruses WIV-1 and RsSHC014 (FIG. 8f-g). These data suggest that S626-161 recognizes a conserved epitope that is shared between these sarbecovirus lineages, but is absent in BA.2. Additionally, compared to S728-1157 and S451-1140, S626-161 has a longer CDR-H3 which could provide an enhanced capability to recognize a highly conserved patch of residues shared across sarbecoviruses as described in a previous study (16) (FIG. 12). When comparing immunoglobulin heavy (IGHV) and light chain (IGLV or IGKV) variable genes of these three bnAbs with the available SARS-CoV-2 neutralizing mAbs database (12, 17-25), the inventors found that heavy chain variable genes utilized by S728-1157 (IGHV3-66), S451-1140 (IGHV3-23) and S626-161 (IGHV4-39) have been previously reported to encode several potently neutralizing SARS-CoV-2 antibodies targeting the RBD (18, 19, 26, 27). However, our mAbs had unique heavy and light chain variable gene pairings that have not been reported in the database (Table S2), indicating that they are not public clonotypes.

[0479] These three bnAbs (S451-1140, S626-161 and S728-1157) were characterized further to determine the binding breadth against SARS-CoV-2 VOCs (FIG. 8h-k). The prefusion-stabilized spike containing two-proline substitutions in the S2 subunit (2P; diproline) has been shown to be a superior immunogen compared to the wildtype spike and is the basis of several current SARS-CoV-2 vaccines, including current mRNA-based vaccines (28,29). More recently, spike protein stabilized with six prolines (6P; hexaproline) was shown to boost expression and be even more stable than the original diproline construct; as a result, it has been proposed for use in improving the next-generation of COVID-19 vaccines (30,31). To determine if there are antigenicity differences between the diproline and hexaproline spike constructs, both immunogens were included in our test panel. As measured by ELISA assay, the inventors found that three bnAbs bound 6P-WT spike antigen to a greater extent compared to WT-2P spike (FIG. 8h-j). All three bnAbs showed comparable binding to the spikes of Alpha, Beta, Gamma and Delta viruses, relative to that of WT-2P (FIG. 8h-j). However, the binding reactivity of these three bnAbs were substantially reduced against a panel of Omicron-family antigens (FIG. 8h-k). S451-1140 binding was sensitive to mutations found in BA.1 and BA.2, resulting in a decrease in binding of more than 3-fold (range of 3- to 11.2-fold) and a 31-fold decrease in neutralization against these variants compared with WT-2P antigen and D614G virus, respectively (FIG. 8g, i, k). The sarbecovirus-cross neutralizing mAb, S626-161 also showed 1.7 to 3.9-fold reduced binding to spike BA.1 antigens and thereby resulted in a 2-fold reduction in neutralization activity against BA.1 (FIG. 8g, j, k). For the most potent bnAb, S728-1157, binding to Omicron antigens was substantially reduced by greater than 1.7-fold (range of 1.7- to 5.5-fold) compared with WT-2P spike but was unaffected in neutralizing activity (FIG. 8g, h, k). Notably, all three bnAbs showed over 3-fold increased binding to spike BA.1-6P compared with the BA.1-2P version, suggesting a better accessibility of bnAbs to the hexaproline spike BA.1 construct. In addition to ELISA, biolayer interferometry (BLI) was used to quantify the binding rate and equilibrium constants (kon, koff, and K_{D}) of these three bnAbs to a panel of spike antigens (FIG. 13b-d). The recognition kon rates of Fabs were 1.5 to 3.3-fold faster to hexaproline spikes, showing that the antibodies bound to the 6P construct more rapidly than to 2P. This is expected if the epitopes are more exposed on the RBD in the open state on the hexaproline spike (FIG. 13c). Except for S626-161, off-rate of the Fabs were also longer such that the overall K_{D} showed that S728-1157 and S451-1140 bound to the hexaproline spike with substantially greater affinity (FIG. 13c-d). The increased off rates further suggest partial occlusion of the binding site on diproline spike. The improved binding to hexaproline spike was even more notable for whole dimeric IgG by the 1:2 interaction model and for all three bnAbs, consistent with exposure of multiple epitopes with 6P stabilization allowing improved avidity (FIG. 13b-d). Taken together, these results suggest that the epitopes targeted may be comparatively more accessible on the 6P-stabilized spike with the RBD in the open state. Structural analyses were next performed to verify this conjecture.

### 2. Structural Analysis of Broadly Neutralizing Monoclonal Antibodies

[0480] As a first approximation of epitopes bound, an ELISA competition assay was used to determine whether the three broadly-neutralizing mAbs shared any overlap with our current panel of mAbs and a collection of mAbs with known epitope specificities from previous studies (12, 32, 33), plus two other mAbs currently in clinical use (LY-CoV555 (Eli Lilly) (34) and REGN10933 (Regeneron) (35)). The binding sites of S451-1140 and S728-1157 partially overlapped with CC12.3 (33,36), a class 1 neutralizing antibody, and most class 2 antibodies, including LY-CoV555 and REGN10933, but not with class 3 and class 4 antibodies (FIG. 9a). S626-161 shared a notable overlap in binding region with class 1 CC12.3, several class 4 antibodies including CR3022, and other unclassified antibodies, while having some partial overlap with several class 2 and one class 3 antibodies (FIG. 9a). Analogously, competition BLI assay revealed that S451-1140 and S728-1157 strongly competed with one another for binding to spike WT-6P, whereas S626-161 did not (FIG. 14). Overall, these data suggest S451-1140 and S728-1157 recognize similar epitopes that are distinct from S626-161.

[0481] S728-1157 was encoded by IGHV3-66 and possessed a short complementarity determining region 3 (CDR-H3). Notably, mAbs that bind the receptor binding site (RBS) in binding mode 1 (i.e. RBS-A or class 1 site), typified by CC12.1, CC12.3, B38, and C105 (15, 25, 27, 36-38), tend to use IGHV3-53/3-66 and are sensitive to VOC mutations (39). However, the CDR-H3 region of S728-1157 is highly distinct from other antibodies of this class, potentially accounting for its broader activity. To understand the structural basis of broad neutralization by S728-1157 at this epitope, the inventors resolved a cryo-electron microscopy (cryo-EM) structure (FIG. 9b) of IgG S728-1157 in complex with spike WT-6P-Mut7, a version of spike WT-6P possessing interprotomer disulfide bond at C705 and C883, at ˜3.3 Å global resolution (FIG. 15e).

[0482] Using symmetry expansion, focused classification, and refinement methods, the inventors achieved local resolution at the RBD-Fv interface to ˜4 Å (FIG. 15e and Table S6). A crystal structure of S728-1157 Fab was determined at 3.1 Å resolution and used to build the atomic model at the RBD-Fv interface. Our structures confirm that S728-1157 binds the RBS-A (or class 1) epitope in the RBD-up conformation (FIG. 9b and FIG. 15e), similar to other IGHV3-53/3-66 antibodies (FIG. 9c). Steric blockage of the angiotensin converting enzyme 2 (ACE2) binding site by S728-1157 explains its high neutralization potency against SARS-CoV-2. The ₃₂NY₃₃ motif and ₅₃SGGS₅₆ motif (36) in S728-1157 CDR-H1 and-H2 interact with the RBD in almost the same way as CC12.3 (FIG. 15b-c). However, V_{H 98}DY₉₉ in S728-1157 CDR-H3 forms more extensive interactions including both hydrophobic and polar interactions with the RBD, compared to V_{H 98}DF ₉₉ in CC12.3 (FIG. 9d and Table S5). The diglycine V_{H 100}GG₁₀₁ in S728-1157 CDR-H3 may also facilitate more extensive binding compared to VH Y₁₀₀ in CC12.3 likely due to the flexibility in the glycine residues that lead to a different conformation of the tip of the CDR-H3 loop and a relative shift of residues at 98DY 99.

[0483] Although the Omicron VOCs have extensive mutations in the RBD (FIG. 9c and FIG. 13a), most of these residues do not make interactions with or are dispensable for binding to S728-1157, as binding is still observed (FIG. 15a). From our spike WT-6P-Mut7+Fab S728-1157 model, Y505 to V_{L} Q31, and E484 to V_{H} Y99 are predicted to make hydrogen bonds (FIG. 15d and Table S5), which have the potential to be disrupted by Omicron mutations Y505H and E484A. However, a Y505H mutation would still allow for a hydrogen bond with VL Q31 and an E484A mutation would add another hydrophobic side chain near hydrophobic residues VL Y99, F456, and Y489. These contacts may explain the mechanism which enabled S728-1157 to retain neutralizing activity (FIG. 8g), albeit reduced binding reactivity against spike BA.1 antigen, which is in turn possibly due to the function of Omicron mutations in altering the conformational landscape of the spike protein (40). Notably, while the variable genes were well-mutated, all but one of the contact residues between the CDR-H3 of S728-1157 and the VOC were predicted to be germline encoded and not introduced by somatic mutations, likely limiting the number of existing memory B cells of this class that could be further adapted by somatic mutation to protect against VOC strains (FIG. 12, Table S5). Overall, our structural studies revealed the basis of broad neutralization of S728-1157 that can accommodate most mutations in the SARS-CoV-2 VOCs.

### 3. S728-1157 Reduces Replication of SARS-CoV-2 Delta and Omicron Variants in Syrian Hamsters

[0484] To evaluate the protective efficacy of our broadly neutralizing mAbs, the inventors utilized a golden Syrian hamster infection model that has been widely used for SARS-CoV-2 infection. Hamsters received 5 mg/kg of individual mAbs or an irrelevant antigen (ebolavirus glycoprotein)-specific isotype control via intraperitoneal injection one day post-infection with SARS-CoV-2 viruses. Lung and nasal tissues were collected at 4 days post-infection (dpi) (FIG. 10a). Therapeutic administration of S728-1157 resulted in reduced titers of wildtype, BA.1 Omicron and Delta variants in both the nasal turbinates and lungs of infected hamsters (FIG. 10b-d). Interestingly, the effect of S728-1157 in the lungs was dramatic, reducing wildtype viral loads by ˜10⁴ PFU, and BA.1 Omicron by ˜10⁵ PFU, with replication of the latter being completely abolished (FIG. 10c). In contrast to in vitro neutralization, S451-1140 did not reduce BA.1 Omicron viral replication in lung and nasal turbinates, indicating the disconnect between in vitro neutralization and in vivo protection for S451-1140 (FIG. 10e). In comparison, S626-161 administration resulted in significant but marginal reductions in lung viral titers following wildtype and BA.1 challenge (FIG. 10f-g). These data underscore that to precisely define broadly protective mAbs, evaluating protection efficacy in parallel with neutralization activity is required. Overall, S728-1157 represents a promising mAb with broad neutralization efficacy against SARS-CoV-2 variants that is capable of dramatically reducing wildtype, Delta and BA.1 replication in vivo.

4. SARS-CoV-2 Infection Rarely Elicits Potent S728-1157-Like Cross-Neutralizing mAbs

[0485] Given the cross-neutralization and prophylactic potential of S728-1157, the inventors sought to evaluate whether S728-1157-like antibodies are commonly induced among polyclonal responses in SARS-CoV-2 patients. To assess this, the inventors performed competition ELISAs using convalescent serum to detect anti-RBD antibody titers that could compete for binding with S728-1157 (FIG. 11a). Subjects were divided into three groups based on their magnitude of antibody responses, as defined previously (12,13). Although high- and moderate-responders had higher titers of S728-1157-competitive serum antibodies compared to low-responders (FIG. 11b), the titers were quite low across all groups suggesting that it is uncommon to acquire high levels of S728-1157-like antibodies in polyclonal serum following wildtype SARS-CoV-2 infection. In addition to S728-1157, the inventors tested the competition of convalescent serum with other mAbs, including S451-1140 and S626-161, LY-CoV555, REGN10933, CR3022, and CC12.3. Similar to S728-1157, the inventors observed relatively low titers of antibodies competing with S451-1140, S626-161, LY-CoV555, REGN10933 and CC12.3 in polyclonal serum from most of the convalescent individuals (FIG. 11c-f, h). Nonetheless, high-responders tended to have significantly higher titers against those neutralizing mAbs than low-responders (FIG. 11b-f, h). In contrast, antibodies targeting the CR3022 epitope site were more pronounced in convalescent individuals, suggesting the enrichment of class 4 RBD antibodies in polyclonal serum (FIG. 11g). Notably, there was no difference in titers of CR3022 across the three responder groups, suggesting that CR3022-site antibodies were largely induced during wildtype SARS-CoV-2 infection. Interestingly, as compared to CC12.3, S728-1157 was detected at 4-fold lower levels in the serum of high-responders. Thus, despite class 1 antibodies being frequently induced by natural infection and vaccination (17, 26, 27, 41-44), our data suggest that S728-1157-like antibodies represent a subset of this class that are comparatively rare.

[0486] Lastly, the inventors examined the difference in reactivity to 2P-versus 6P-stabilized spike in our convalescent cohort sera (FIG. 11i-k). The inventors found that all three responder groups mounted anti-spike reactive antibodies against 6P-stabilized spike wildtype to a greater extent than 2P-stabilized spike wildtype, by a factor of 6 to 11-fold (FIG. 11j), indicating that the major antigenic epitopes were better exhibited or stabilized on 6P-stabilized antigen. Using the same samples, high and moderate responders also had lower anti-spike antibodies against BA.1-2P than BA.1-6P, by 4 to 5-fold (FIG. 11k). Of note, low responders had a smaller fold change in binding reactivity against spike BA.1 Omicron-2P and 6P (2-fold reduction) compared to wildtype-2P and 6P spike (11-fold reduction) (FIG. 11j-k), suggesting that serum antibody against BA.1 Omicron-reactive epitopes may be limited in low responder subjects. Overall, these data suggest that there is improved polyclonal binding induced by natural infection to 6P-stabilized spike, both for wildtype and Omicron viruses.

### C. Materials and Methods

### 1. Monoclonal Antibody Isolation

[0487] The inventors isolated a panel of RBD-reactive mAbs from peripheral blood mononuclear cells (PBMCs) of convalescent donors who previously had experienced symptomatic infection with SARS-CoV-2 (Table S1). The samples were collected during the first wave of the pandemic in May 2020, before other SARS-CoV-2 variants emerged. All studies were performed with the approval of the University of Chicago institutional review board (IRB20-0523). All participants provided prior written informed consent for the use of blood in research applications. This clinical trial was registered at ClinicalTrials.gov under identifier NCT04340050.

[0488] PBMCs were isolated from leukoreduction filters and frozen as described previously (21). B cells were enriched from PBMCs via fluorescence-activated cell sorting (FACS). Cells were stained with CD19, CD3, and antigen probes conjugated oligo-fluorophore; cells of interest were identified as CD3⁻CD19⁺Antigen⁺. All mAbs were generated from oligo-tagged antigen bait-sorted cells identified through single-cell RNA sequencing (RNA-seq), as described previously (12,21).

[0489] Antigen-specific B cells were selected to generate mAbs based on antigen-probe intensity analyzed by JMP Pro 15. Antibody heavy and light chain genes were synthesized and cloned into human IgG1 and human kappa or lambda light chain expression vectors by Gibson assembly as previously described (56). The heavy and light chains of the corresponding mAb were transiently co-transfected into HEK293T cells. After transfection for 18 h, the transfected cells were supplemented with Protein-Free Hybridoma Medium Supernatant (PFHM-II, Gibco). The supernatant containing secreted mAb was harvested at day 4 and purified using protein A-agarose beads (Thermo Fisher) as detailed previously (56).

### 2. Recombinant Spike Protein Expression

[0490] The recombinant D614G SARS-CoV-2 full-length (FL) spike, WT RBD, single RBD mutants (R346S, K417N, K417T, G446V, L452R, S477N, F486A, F486Y, N487Q, Y489F, Q493A, Q493N, N501Y, Y505A, Y505F), combination RBD mutant (K417N/E484K/L452R/NN501Y), SARS-CoV-1 RBD and MERS-CoV RBD were generated in-house. Briefly, the recombinant antigens were expressed using Expi293F cells. The gene of interest was cloned into mammalian expression vector (in-house modified AbVec) and transfected using ExpiFectamine 293 kit according to the manufacturer's protocol. The supernatant was harvested at day 4 after transfection and incubated with Ni-nitrilotriacetic acid (Ni-NTA) agarose (Qiagen). The purification was carried out using gravity flow column and eluted with imidazole-containing buffer as previously described (57,58). The eluate was buffering-exchanged with PBS using Amicon centrifugal unit (Millipore). The recombinant FL spikes derived from variants B.1.1.7 Alpha, B.1.351 Beta, P.1 Gamma, B.1.617.2 Delta, BA.1, BA.2 and BA.4 Omicron were produced in the Sather Laboratory at Seattle Children's Research Institute. The K417V, N439K, E484K RBDs and recombinant FL spike WT-2P and 6P were produced in Krammer laboratory at the Icahn School of Medicine at Mount Sinai. The SARS-CoV-2-6P-Mut7 and spike BA.1 Omicron-6P were designed and produced as described in a previous study (59). The protein sequences and resources for each antigen are listed in Table S3.

### 3. Enzyme-Linked Immunosorbent Assay (ELISA)

[0491] Recombinant SARS-CoV-2 spike/RBD proteins were coated onto high protein-binding microtiter plates (Costar) at 2 μg/ml in phosphate buffered saline (PBS) at 50 μl/well, and kept overnight at 4° C. Plates were washed with PBS containing 0.05% Tween 20 (PBS-T) and blocked with 150 μl of PBS containing 20% fetal bovine serum (FBS) for 1 h at 37° C. Monoclonal antibodies were serially diluted 3-fold starting from 10 μg/ml in PBS and incubated in the wells for 1 h at 37° C. Plates were then washed and incubated with horseradish peroxidase (HRP)-conjugated goat anti-human IgG antibody (Jackson ImmunoResearch, 1:1000) for 1 h at 37° C. After washing, 100 μl of Super AquaBlue ELISA substrate (eBioscience) was added per well. Absorbance was measured at 405 nm on a microplate spectrophotometer (Bio-Rad). The assays were standardized using control antibodies with known binding characteristics in every plate, and the plates were developed until the absorbance of the control reached an optical density (OD) of 3.0. All mAbs were tested in duplicate, and each experiment was performed twice.

### 4. Serum ELISA

[0492] High protein-binding microtiter plates were coated with recombinant SARS-CoV-2 spike antigens at 2 μg/ml in PBS overnight at 4° C. Plates were washed with PBS 0.05% Tween and blocked with 200 μl PBS 0.1% Tween+3% skim milk powder for 1 hour at room temperature (RT). Plasma samples were heat-inactivated for 1 hour at 56° C. before perform serology experiment. Plasma were serially diluted 2-fold in PBS 0.1% Tween+1% skim milk powder. Plates were incubated with serum dilutions for 2 hours at RT. The HRP-conjugated goat anti-human Ig secondary antibody diluted at 1:3000 with PBS 0.1% Tween+1% skim milk powder was used to detect binding of antibodies. After 1-hour of incubation, plates were developed with 100 μl SigmaFast OPD solution (Sigma-Aldrich) for 10 minutes. Then, 50 μl 3M HCl was used to stop the development reaction. Absorbance was measured at 490 nm on a microplate spectrophotometer (BioRad). End point titers were extrapolated from sigmoidal 4PL (where X is log concentration) standard curve for each sample. Limit of detection (LOD) is defined as the mean plus 3 S.D. of the O.D. signal recorded using plasma from pre-SARS-CoV-2 subjects. All calculations were performed in GraphPad Prism software (version 9.0).

### 5. Competition ELISA

[0493] To determine the target epitope classification of RBD-reactive mAbs, competition ELISAs were performed using other mAbs with known epitope binding characteristics as competitor mAbs. Competitor mAbs were biotinylated using EZ-Link sulfo-NHS-biotin (Thermo Scientific) for 2 h at room temperature (RT). The excess biotin of biotinylated mAbs was removed with 7k molecular weight-cutoff (MWCO) Zeba spin desalting columns (Thermo Scientific). Plates were coated with 2 μg/ml RBD antigen overnight at 4° C. Plates were blocked with PBS-20% FBS for 2 h at RT, and the 2-fold dilution of the mAbs of an undetermined class, or serum, was added, starting at 20 μg/ml of mAbs and a 1:10 dilution of serum. After antibody incubation for 2 h at RT, the biotinylated competitor mAb was added at a concentration twice that of its dissociation constant (K_{D}) and incubated for another 2 h at RT together with the mAb or serum that was previously added. Plates were washed and incubated with 100 μl HRP-conjugated streptavidin (Southern Biotech) at a dilution of 1:1000 for 1 h at 37° C. The plates were developed with the Super AquaBlue ELISA substrate (eBioscience). To normalize the assays, the competitor biotinylated mAb was added in a well without any competing mAbs or serum as a control. Data were recorded when the absorbance of the control well reached and OD of 1.0-1.5. The percent competition between mAbs was then calculated by dividing a sample's observed OD by the OD reached by the positive control, subtracting this value from 1, and multiplying by 100. For serum, ODs were log₁₀-transformed and analyzed by nonlinear regression to determine the 50% inhibition concentration (IC50) values using GraphPad Prism software (version 9.0). The data were transformed to Log 1P and plotted into graph representative of reciprocal serum dilution of the IC50 of serum dilution that can achieve 50% competition with the competitor mAb of interest. All mAbs were tested in duplicate, each experiment was performed two times independently, and values from two independent experiments were averaged.

### 6. Plaque Assays

[0494] Plaque assays were performed with SARS-CoV-2 variant viruses on Vero E6/TMPRSS2 cells (Table S4). Cells were cultured to achieve 90% confluency prior to being trypsinized and seeded at a density of 3×10⁴ cells/well in 96-well plates. On the following day, 10² plaque-forming unit (PFU) of SARS-CoV-2 variant was incubated with 2-fold-diluted mAbs for 1 h. The antibody-virus mixture was incubated with Vero E6/TMPRSS2 cells for 3 days at 37° C. Plates were fixed with 20% methanol and then stained with crystal violet solution. The complete inhibitory concentrations (IC99) were calculated using the log (inhibitor) versus normalized response (variable slope), performed in GraphPad Prism (version 9.0). All mAbs were tested in duplicate, and each experiment was performed twice.

### 7. Focus Reduction Neutralization Test (FRNT)

[0495] Focus reduction neutralization test (FRNT) were used to determine neutralization activities as an additional platform beside plaque assay. Serial dilutions of serum starting at a final concentration of 1:20 will be mixed with 103 focus-forming units of virus per well and incubated for 1 h at 37° C. A pooled pre-pandemic serum sample is served as a control. The antibody-virus mixture will be inoculated onto Vero E6/TMPRSS2 cells in 96-well plates and incubated for 1 h at 37° C. An equal volume of methylcellulose solution was added to each well. The cells were incubated for 16 h at 37° C. and then fixed with formalin. After the formalin was removed, the cells were immunostained with a mouse monoclonal antibody against SARS-CoV-1/2 nucleoprotein [clone 1C7C7 (Sigma-Aldrich)], followed by a HRP-labeled goat anti-mouse immunoglobulin (SeraCare Life Sciences). The infected cells were stained with TrueBlue Substrate (SeraCare Life Sciences) and then washed with distilled water. After cell drying, the focus numbers were quantified by using an ImmunoSpot S6 Analyzer, ImmunoCapture software, and BioSpot software (Cellular Technology). The IC50 was calculated from the interpolated value from the log (inhibitor) versus normalized response, using variable slope (four parameters) nonlinear regression performed in GraphPad Prism (version 9.0).

### 8. Negative Stain Electron Microscopy

[0496] Spike BA.1 Omicron-6P was complexed with a 0.5-fold molar excess of IgG S728-1157 and incubated for 30 mins at room temperature. The complex was diluted to 0.03 mg/ml and deposited on a glow-discharged carbon-coated copper mesh grid. 2% uranyl formate (w/v) was used to stain the sample for 90 seconds. The negative stain dataset was collected on a Thermo Fisher Tecnai T12 Spirit (120 keV, 56,000× magnification, 2.06 apix) paired with a FEI Eagle 4k×4k CCD camera. Leginon (60) was used to automate the data collection and raw micrographs were store in the Appion database (61). Dogpicker (62) picked particles and the dataset was processed in RELION 3.0 (62). UCSF Chimera (63) was used for map segmentation and figure making.

### 9. Cryo-Electron Microscopy and Model Building

[0497] SARS-CoV-2-6P-Mut7 was complexed with a 0.5-fold molar excess of IgG S728-1157 and incubated for 30 mins at room temperature. Grids were prepared using a Thermo Fisher Vitrobot Mark IV set to 4° C. and 100% humidity. The complex, at 0.7 mg/ml, was briefly incubated with lauryl maltose neopentyl glycol (final concentration of 0.005 mM; Anatrace), deposited on a glow-discharged Quantifoil 1.2/1.3-400 mesh grid, and blotted for 3 seconds. The grid was loaded into a Thermo Fisher Titan Krios (130,000× magnification, 300 kEV, 1.045-Å pixel size) paired with a Gatan 4k×4k K2 Summit direct electron detector. The Leginon software was used for data collection automation and resulting images were stored in the Appion database. Initial data processing was performed with cryoSPARC v3.2 (64), which included CTF correction using GCTF (65), template picking, and 2D and 3D classification and refinement methods leading to a ˜3.3 Å Cl global reconstruction. The particles from this reconstruction were imported into Relion 3.1 (66), subjected to C3 symmetry expansion, followed by focused 3D classifications without alignments using a mask around the antibody Fab and S-protein RBD regions of a single protomer. Classes with well-resolved density in this region were selected and subjected to additional rounds of focused classification. Refinements were performed with limited angular searches and a mask around the trimeric S-protein and a single Fab. The final set of particles reconstructed to ˜3.7 Å global resolution.

[0498] Model building was initiated by rigid body docking of the x-ray structure of the Fab and a published cryo-EM model of the SARS-CoV-2 spike open state (PDB ID: 6VYB) into the cryo-EM map using UCSF Chimera (63). Manual building, mutagenesis and refinement were performed in Coot 0.9.6 (67), followed by relaxed refinement using Rosetta Relax (68). Model manipulation and validation was also done using Phenix 1.20 (69). More complete data collection, processing and model building statistics are summarized in Table S6. Figures were generated using UCSF ChimeraX (70).

### 10. Crystallization and X-Ray Structure Determination

[0499] 384 conditions of the JCSG Core Suite (Qiagen) were used for crystal screening of S728-1157 Fab crystals on the robotic CrystalMation system (Rigaku) at Scripps Research. Crystallization trials were set-up by the vapor diffusion method in sitting drops containing 0.1 μl of protein complex and 0.1 μl of reservoir solution. Crystals appeared on day 14, were harvested on day 21, pre-equilibrated in cryoprotectant containing 15% ethylene glycol, and then flash cooled and stored in liquid nitrogen until data collection. Diffraction quality crystals were obtained in solution containing 0.2 M di-Ammonium tartrate, 20% (w/v) polyethylene glycol (PEG) 3350. Diffraction data were collected at cryogenic temperature (100 K) on Scripps/Stanford beamline 12-1 at the Stanford Synchrotron Radiation Lightsource (SSRL). The X-ray data were processed with HKL2000 (71). The X-ray structures were solved by molecular replacement (MR) using PHASER (72) with MR models for the Fabs from PDB ID: 7KN4 (73). Iterative model building and refinement were carried out in COOT (74) and PHENIX (75), respectively. (76)

### 11. Animals and Challenge Viruses

[0500] To determine whether mAbs in the panel could reduce viral load in vivo, Syrian hamsters (females, 6-8 weeks old) were intraperitoneally administered 5 mg/kg of candidate mAb 1 day after intranasal infection with 103 PFU of SARS-CoV-2 viruses (an early SARS-CoV-2 isolate, Delta or BA.1 Omicron). Control animals were treated with an Ebola-specific mAb (KZ52) of matched isotype. At day 4 post-infection, lung tissues and nasal turbinate were collected to evaluate viral titers by standard plaque assay on Vero E6/TMPRRSS2 cells. The animal study was conducted in accordance with the recommendations for care and use of animals by the Institutional Animal Care and Use Committee at the University of Wisconsin under BSL-3 containment using approved protocols.

### 12. Biolayer Interferometry (BLI)

[0501] To determine precise binding affinity, the dissociation constant (K_{D}) of each mAb was performed by biolayer interferometry (BLI) with an Octet K2 instrument (Forte Bio/Sartorious). The trimeric spike SARS-CoV-2 and its variants were biotinylated (EZ-Link Sulfo-NHS-Biotin, ThermoFisher), desalted (Zeba Spike Desalting, ThermoFisher), and loaded at a concentration of 500 nM onto streptavidin (SA) biosensor (Forte Bio/Sartorious) for 300 s, followed by kinetic buffer (1× PBS containing 0.02% Tween-20 and 0.1% bovine serum albumin) for 60 s. The biosensor was then moved to associate with mAbs of interest (142 nM) for 300 s, followed by disassociation with the kinetic buffer for 300 s. On rate, off-rate, and K_{D} were evaluated with a global fit, the average of those values with high R-squared from two independent experiments were presented. Analysis was performed by Octet Data Analysis HT software (Forte Bio/Sartorious) with 1:1 fitting model for Fabs and 1:2 interacting model for IgG.

[0502] For competitive assay by BLI, streptavidin (SA) biosensor was pre-equilibrated in 1×PBS for at least 600 s to bind with the biotinylated trimeric spike WT-6P and spike BA.1 Omicron-6P for 300 s. The first mAb was associated on the loaded sensor for 300 s, followed by the second mAb for another 300 s. The final volume for all the solutions was 200 μl/well. All of the assays were performed with kinetic buffer at 30° C. Data were analyzed by Octet Data Analysis HT software (Forte Bio/Sartorious) and plotted using GraphPad Prism.

### 13. Statistics

[0503] All statistical analyses were performed using GraphPad Prism software (version 9.0). The numbers of biological repeats for experiments and specific tests for statistical significance used are described in the corresponding figure legends. P values of ≤0.05 were considered significant [*, P≤0.05; **, P≤0.01; ***, P≤0.001; ****, P<0.0001), while P values of >0.05 were considered as non-significant (ns)].

### D. Tables

[0504] Table S1: COVID-19 convalescent subjects. Related to FIG. 8 and FIG. 11. The mAbs from high responder subjects, S451, S626, S728 were characterized in this study. Responder group and severity were categorized in a previous study¹³. Serum antibody from each responder group were tested for competition ELISA with broad neutralizing mAbs, other therapeutic mAbs and non-neutralizing mAb.

| | | | | | Symptom | | |
|---|---|---|---|---|---|---|---|
| | | | | Duration of | start to | | |
| Subject | | | SARS-CoV- | symptoms | donation | Responder | Severity |
| ID | Age | Sex | 2 PCR Test | (days) | (days) | Category26 | Category26 |
| 3 | 20 | M | Mar. 16, 2020 | 4 | 33 | Low | Moderate |
| 11 | 66 | M | Mar. 30, 2020 | 16 | 49 | High | Severe |
| | | | | | | | (hospitalized) |
| 17 | 42 | M | Mar. 21, 2020 | 17 | 55 | High | Severe |
| 19 | 55 | F | Mar. 15, 2020 | 14 | 44 | Low | Moderate |
| 20 | 31 | M | Mar. 31, 2020 | 19 | 48 | High | Critical |
| | | | | | | | (hospitalized) |
| 22 | 31 | F | Mar. 23, 2020 | 3 | 31 | Mid | Moderate |
| 24 | 34 | M | Mar. 23, 2020 | 12 | 41 | High | Severe |
| 42 | 30 | M | Mar. 18, 2020 | 11 | 39 | Mid | Moderate |
| 63 | 44 | M | Mar. 30, 2020 | 2 | 33 | Low | Moderate |
| 80 | 33 | M | Mar. 26, 2020 | 12 | 40 | Mid | Moderate |
| 89 | 64 | M | Mar. 19, 2020 | 13 | 43 | High | Mild |
| 108 | 58 | M | Mar. 15, 2020 | 11 | 39 | High | Moderate |
| 109 | 34 | M | Mar. 15, 2020 | 9 | 41 | Low | Moderate |
| 112 | 43 | M | Mar. 20, 2020 | 9 | 40 | Low | Moderate |
| 116 | 65 | F | Mar. 25, 2020 | 18 | 49 | Low | Moderate |
| 130 | 52 | M | Mar. 26, 2020 | 7 | 35 | Mid | Mild |
| 135 | 28 | F | Mar. 24, 2020 | 7 | 36 | Low | Moderate |
| 141 | 66 | M | Mar. 20, 2020 | 19 | 48 | High | Moderate |
| 144 | 56 | M | Mar. 16, 2020 | 23 | 54 | Low | Moderate |
| 156 | 50 | F | Mar. 23, 2020 | 11 | 41 | High | Moderate |
| 166 | 42 | F | Mar. 25, 2020 | 17 | 55 | Low | Moderate |
| 176 | 26 | M | Mar. 22, 2020 | 6 | 35 | Low | Moderate |
| 210 | 47 | M | Apr. 4, 2020 | 7 | 41 | Low | Moderate |
| 218 | 51 | F | Mar. 16, 2020 | 19 | 48 | Mid | Severe |
| 229 | 55 | M | Mar. 11, 2020 | 2 | 42 | Low | Mild |
| 251 | 53 | M | Mar. 18, 2020 | 22 | 51 | Low | Severe |
| 266 | 20 | F | Mar. 25, 2020 | 4 | 32 | Low | Mild |
| 270 | 50 | M | Mar. 18, 2020 | 9 | 39 | Mid | Moderate |
| 272 | 42 | M | Mar. 18, 2020 | 14 | 43 | Mid | Moderate |
| 277 | 65 | M | Mar. 18, 2020 | 13 | 45 | High | Moderate |
| 278 | 52 | F | Mar. 12, 2020 | 12 | 47 | Mid | Moderate |
| 293 | 72 | M | Mar. 8, 2020 | 17 | 63 | High | Severe |
| | | | | | | | (hospitalized) |
| 305 | 43 | F | Apr. 17, 2020 | 4 | 47 | Low | Moderate |
| 319 | 76 | M | Mar. 27, 2020 | 4 | 36 | High | Mild |
| 332 | 32 | M | Mar. 21, 2020 | 6 | 35 | Mid | Moderate |
| 346 | 30 | M | Mar. 16, 2020 | 11 | 39 | Mid | Moderate |
| 355 | 45 | F | Mar. 14, 2020 | 14 | 44 | Low | Moderate |
| 373 | 48 | M | Mar. 16, 2020 | 7 | 39 | High | Moderate |
| 377 | 44 | M | Mar. 14, 2020 | 9 | 41 | High | Moderate |
| 385 | 33 | M | Mar. 11, 2020 | 7 | 47 | Mid | Moderate |
| 407 | 34 | M | Apr. 1, 2020 | 11 | 43 | Mid | Moderate |
| 433 | 33 | M | Mar. 20, 2020 | 6 | 35 | Low | Moderate |
| 447 | 42 | M | Apr. 1, 2020 | 21 | 61 | High | Severe |
| 451 | 46 | M | Apr. 4, 2020 | 11 | 49 | High | Severe |
| | | | | | | | (hospitalized) |
| 537 | 36 | M | Mar. 23, 2020 | 14 | 59 | Mid | Moderate |
| 564 | 24 | F | Mar. 19, 2020 | 32 | 60 | Low | Severe |
| 573 | 25 | M | Mar. 20, 2020 | 17 | 56 | High | Severe |
| | | | | | | | (hospitalized) |
| 626 | 44 | M | Mar. 31, 2020 | 19 | 56 | High | Moderate |
| 728 | 62 | F | Mar. 15, 2020 | 53 | 130 | High | Severe |

Table S2: Characteristics of SARS-CoV-2 RBD-reactive mAbs. Related to FIG. 8. Cross-neutralizing mAbs against D614G and B.1.351 Beta, B.1., 617.2 Delta, B.1.617.1 Kappa, B. 1.621 Mu, BA.1 Omicron are bolded.

| | Epitope | | | # VH | #VL | CDR-H3 | CDR-L3 |
|---|---|---|---|---|---|---|---|
| mAb ID | specificity | VH gene | VL gene | SHM | SHM | length | length |
| S451-5 | RBD | IGHV2-70*01 | IGLV1-44*01 | 4 | 1 | 12 | 11 |
| | Class 2 | | | | | | |
| S451-506 | RBD | IGHV3-53*02 | IGKV1-9*01 | 9 | 4 | 12 | 10 |
| | Class 3 | | | | | | |
| S451-1140 | RBD | IGHV3-23*04 | IGKV4-1*01 | 8 | 7 | 12 | 9 |
| | Unclassified | | | | | | |
| S451-1190 | RBD | IGHV2-5*02 | IGLV2-14*01 | 8 | 8 | 9 | 11 |
| | Class 3 | | | | | | |
| S626-84 | RBD | IGHV1-2*02 | IGLV2-23*02 | 7 | 9 | 16 | 10 |
| | Class 2 | | | | | | |
| S626-161 | RBD | IGHV4-39*01 | IGKV3-20*01 | 8 | 2 | 18 | 10 |
| | Unclassified | | | | | | |
| S626-664 | RBD | IGHV4-39*01 | IGLV1-51*02 | 8 | 5 | 19 | 10 |
| | Unclassified | | | | | | |
| S728-209 | RBD | IGHV2-5*04 | IGKV1-12*01 | 14 | 12 | 12 | 9 |
| | Unclassified | | | | | | |
| S728-369 | RBD | IGHV4-31*03 | IGKV1-5*03 | 18 | 13 | 23 | 8 |
| | Unclassified | | | | | | |
| S728-430 | RBD | IGHV3-53*01 | IGKV1-33*01 | 1 | 1 | 12 | 10 |
| | Class 2 | | | | | | |
| S728-537 | RBD | IGHV1-2*02 | IGKV1-12*01 | 15 | 9 | 17 | 9 |
| | Class 2 | | | | | | |
| S728-1157 | RBD | IGHV3-66*02 | IGLV3-9*01 | 20 | 9 | 10 | 9 |
| | Unclassified | | | | | | |
| S728-1261 | RBD | IGHV4-4*02 | IGKV3-20*01 | 8 | 12 | 13 | 10 |
| | Unclassified | | | | | | |
| S728-1690 | RBD | IGHV1-69*04 | IGKV3-20*01 | 19 | 8 | 15 | 9 |
| | Class 2 | | | | | | |

Table S3: Antigen information and resource. Proline substitutions are indicated as italic. Related to FIG. 8 and FIG. 13.

| | | | | | |
|---|---|---|---|---|---|
| Antigen | S1 NTD | RBD | S1 CTD | S2 | Source |

Spike FL, trimer

| | | | | | |
|---|---|---|---|---|---|
| Wildtype(WT)-2P | — | — | — | K986P, | Krammer lab |
| | | | | V987P | |
| Wildtype(WT)-6P | — | — | — | F817P, | Krammer lab |
| | | | | A829P, | |
| | | | | A899P, | |
| | | | | A942P, | |
| | | | | K986P, | |
| | | | | V987P | |
| B.1.1.7 Alpha-2P | del69-70, | N501Y | A570D, | T716I, | Sather lab |
| | del144 | | D614G, | S982A, | |
| | | | P681H | K986P, | |
| | | | | V987P, | |
| | | | | D1118H | |
| B.1.351 Beta-2P | L18F, | K417N, | D614G | A701V, | Sather lab |
| | D80A, D215G, | E484K, | | K986P, | |
| | del241-243, | N501Y | | V987P | |
| | R246I | | | | |
| P.1 Gamma-2P | L18F, | K417T, | D614G, | K986P, | Sather lab |
| | T20N, | E484K, | H655Y | V987P, | |
| | P26S, D138Y, | N501Y | | T1027I, | |
| | R190S | | | V1176F | |
| B.1.617.2 Delta-2P | T19R, G142D, | L452R, | D614G, | D950N, | Sather lab |
| | del156-157, | T478K, | P681R | K986P, | |
| | R158G | | | V987P | |
| BA.1 Omicron-2P | A67V, | G339D, | T547K, | N764K, | Sather lab |
| | H69del, | S371L, | D614G, | D796Y, | |
| | V70del, | S373P, | H655Y, | N856K, | |
| | T95I, | S375F, | N679K, | Q954H, | |
| | G142D, | K417N, | P681H | N969K, | |
| | V143del, | N440K, | | L981F, | |
| | Y144del, | G446S, | | K986P, | |
| | Y145del, | S477N, | | V987P | |
| | N211del, L212I, | T478K, | | | |
| | insert214EPE | E484A, | | | |
| | | Q493R, | | | |
| | | G496S, | | | |
| | | Q498R, | | | |
| | | N501Y, | | | |
| | | Y505H | | | |
| BA.1 Omicron-6P | A67V, | G339D, | T547K, | V705C, | Ward lab |
| | H69del, | S371L, | D614G, | N764K, | |
| | V70del, | S373P, | H655Y, | D796Y, | |
| | T95I, | S375F, | N679K, | F817P, | |
| | G142D, | K417N, | P681H | A829P, | |
| | V143del, | N440K, | | N856K, | |
| | Y144del, | G446S, | | T883C, | |
| | Y145del, | S477N, | | A899P, | |
| | N211del, | T478K, | | A942P, | |
| | insert214EPE | E484A, | | Q954H, | |
| | | Q493R, | | N969K, | |
| | | G496S, | | L981F, | |
| | | Q498R, | | K986P, | |
| | | N501Y, | | V987P | |
| | | Y505H | | | |
| BA.2 | T19I, | G339D, | D614G, | N764K, | Sather lab |
| Omicron-2P | L24del, | S371F, | H655Y, | D796Y, | |
| | P25del, | S373P, | N679K, | Q954H, | |
| | P26del, | S375F, | P681H, | N969K, | |
| | A27S, | T376A, | | K986P, | |
| | G142D, | D405N, | | V987P | |
| | V213G, | R408S, | | | |
| | | K417N, | | | |
| | | N440K, | | | |
| | | S477N, | | | |
| | | T478K, | | | |
| | | E484A, | | | |
| | | Q493R, | | | |
| | | Q498R, | | | |
| | | N501Y, | | | |
| | | Y505H | | | |
| BA.4 | T19I, | G339D, | D614G, | N764K, | Sather lab |
| Omicron-2P | L24del, | S371F, | H655Y, | D796Y, | |
| | P25del, | S373P, | N679K, | Q954H, | |
| | P26del, | S375F, | P681H, | N969K, | |
| | A27S, | T376A, | | K986P, | |
| | H69del, | D405N, | | V987P | |
| | V70del, | R408S, | | | |
| | G142D, | K417N, | | | |
| | V213G, | N440K, | | | |
| | | L452R, | | | |
| | | S477N, | | | |
| | | T478K, | | | |
| | | E484A, | | | |
| | | F486V, | | | |
| | | Q498R, | | | |
| | | N501Y, | | | |
| | | Y505H, | | | |

RBD

| | | | | | |
|---|---|---|---|---|---|
| WT | — | — | — | — | In-house |
| R346S | — | R346S | — | — | In-house |
| K417N | — | K417N | — | — | In-house |
| K417V | — | K417V | — | — | Krammer lab |
| K417T | — | K417T | — | — | In-house |
| G446V | — | G446V | — | — | In-house |
| N439K | — | N439K | — | — | Krammer lab |
| L452R | — | L452R | — | — | In house |
| S477N | — | S477N | — | — | In-house |
| E484K | — | E484K | — | — | Krammer lab |
| F486A | — | F486A | — | — | In-house |
| F486Y | — | F486Y | — | — | In-house |
| N487Q | — | N487Q | — | — | In-house |
| Y489F | — | Y489F | — | — | In-house |
| Q493A | — | Q493A | — | — | In-house |
| Q493N | — | Q493N | — | — | In-house |
| N501Y | — | N501Y | — | — | In-house |
| Y505A | — | Y505A | — | — | In-house |
| Y505F | — | Y505F | — | — | In-house |
| K417N/E484K/ | — | K417N/ | — | — | In-house |
| L452R/N501Y | | E484K/ | | | |
| | | L452R/ | | | |
| | | N501Y | | | |

| | |
|---|---|
| SARS-CoV-1 RBD WT | In-house |
| MERS-CoV RBD WT | In-house |

Table S4: SARS-CoV-2 virus information and resource. Related to FIGS. 8 and 10.

| Virus | S1 NTD | RBD | S1 CTD | S2 | Source |
|---|---|---|---|---|---|
| D614G | — | — | D614G | — | 2019-nCoV/USA- |
| | | | | | WA1/2020 D614G |
| B.1.351 | L18F, | K417N, | D614G | A701V | hCoV-19/USA/MD- |
| Beta | D80A, | E484K, | | | HP01542/2021 |
| | D215G, | N501Y | | | |
| | L241del, | | | | |
| | L242del, | | | | |
| | A243del | | | | |
| P.1 | L18F, | K417T, | D614G, | T1027I, | hCoV-19/Japan/TY7- |
| Gamma | T20N, | E484K, | H655Y | V1176F | 501/2021 from BEI |
| | P26S, | N501Y | | | |
| | D138Y, | | | | |
| | G181V, | | | | |
| | R190S | | | | |
| B.1.621 | in3T, | R346K, | D614G, | D950N | hCoV-19/USA/WI-UW- |
| Mu | T95I, | E484K, | P681H | | 4340/2021 |
| | Y144S, | N501Y | | | |
| | Y145N, | | | | |
| B.1.617.1 | G142D, | L452R, | D614G, | Q1071H, | hCoV-19/USA/CA- |
| Kappa | E154K | E484Q | P681R | H1101D | Stanford-15_S02/2021 from |
| | | | | | BEI |
| B.1.617.2 | T19R, | L452R, | D614G, | D950N | hCoV-19/USA/WI-UW- |
| Delta | T95I, | T478K | P681R | | 5250/2021 |
| | G142D, | | | | |
| | E156G, | | | | |
| | F157del, | | | | |
| | R158del | | | | |
| BA.1 | A67V, | G339D, | T547K, | N764K, | hCoV-19/USA/WI-WSLH- |
| Omicron | H69del, | S371L, | D614G, | D796Y, | 221686/2021 |
| | V70del, | S373P, | H655Y, | N856K, | |
| | T95I, | S375F, | N679K, | Q954H, | |
| | G142D, | K417N, | P681H | N969K, | |
| | V143del, | N440K. | | L981F | |
| | Y144del, | G446S, | | | |
| | Y145del, | S477N, | | | |
| | N211del, | T478K, | | | |
| | L212I, | E484A, | | | |
| | ins214EPE | Q493R, | | | |
| | | G496S, | | | |
| | | Q498R, | | | |
| | | N501Y, | | | |
| | | Y505H | | | |
| BA.2 | T19I, | G339D, | D614G, | N764K, | hCoV-19/Japan/UT- |
| Omicron | delL24, | S371F, | H655Y, | D796Y, | NCD1288-2N/2022 |
| | delP25, | S373P, | N679K, | Q954H, | |
| | delP26, | S375F, | P681H | N969K | |
| | A27S, | T376A, | | | |
| | G142D, | D405N, | | | |
| | V213G | R408S, | | | |
| | | K417N, | | | |
| | | N440K, | | | |
| | | S477N, | | | |
| | | T478K, | | | |
| | | E484A, | | | |
| | | Q493R, | | | |
| | | Q498R, | | | |
| | | N501Y, | | | |
| | | Y505H | | | |
| BA.2.75 | T19I, | G339H, | D614G, | N764K, | hCoV-19/Japan/TY41- |
| Omicron | delL24, | S371F, | H655Y, | D796Y, | 716/2022 |
| | delP25, | S373P, | N679K, | Q954H, | |
| | delP26, | S375F, | P681H | N969K | |
| | A27S, | T376A, | | | |
| | G142D, | D405N, | | | |
| | K147E, | R408S, | | | |
| | W152R, | K417N, | | | |
| | F157L, | N440K, | | | |
| | I210V, | G446S, | | | |
| | V213G, | N460K, | | | |
| | G257S | S477N, | | | |
| | | T478K, | | | |
| | | E484A, | | | |
| | | Q498R, | | | |
| | | N501Y, | | | |
| | | Y505H | | | |
| BA.4 | T19I, | G339D, | D614G, | N764K, | hCoV-19/USA/MD- |
| Omicron | delL24, | S371F, | H655Y, | D796Y, | HP30386- |
| | delP25, | S373P, | N679K, | Q954H, | PIDNBNVCCQ/2022 |
| | delP26, | S375F, | P681H, | N969K | |
| | A27S, | T376A, | | | |
| | delH69, | D405N, | | | |
| | delV70, | R408S, | | | |
| | G142D, | K417N, | | | |
| | V213G | N440K, | | | |
| | | L452R, | | | |
| | | S477N, | | | |
| | | T478K, | | | |
| | | F486V, | | | |
| | | E484A, | | | |
| | | Q498R, | | | |
| | | N501Y, | | | |
| | | Y505H, | | | |
| BA.5 | T19I, | G339D, | D614G, | N764K, | SARS-CoV-2/ |
| Omicron | delL24, | S371F, | H655Y, | D796Y, | human/USA/COR-22- |
| | delP25, | S373P, | N679K, | Q954H, | 063113/2022 |
| | delP26, | S375F, | P681H, | N969K | |
| | A27S, | T376A, | | | |
| | delH69, | D405N, | | | |
| | delV70, | R408S, | | | |
| | G142D, | K417N, | | | |
| | V213G | N440K, | | | |
| | | L452R, | | | |
| | | S477N, | | | |
| | | T478K, | | | |
| | | F486V, | | | |
| | | E484A, | | | |
| | | Q498R, | | | |
| | | N501Y, | | | |
| | | Y505H, | | | |

[0505] Table S5: Pairs of S728-1157 and spike-WT-6P-Mut7 residues within predicted hydrogen bonding distances. Calculated using EpitopeAnalyzer⁶³ using a cutoff distance of 3.4 Å. Related to FIG. 9 and FIG. 15.

| | | | | | | RBD residue |
|---|---|---|---|---|---|---|
| | RBD | | | | RBD residue | conserved |
| | Residue | Ab Residue | Antibody | Distance | mutated in | across all |
| # | [Atom] | [atom] | Region | (Å) | Omicron VOC | VOC's |
| 1 | T415 [OG] | S56 [OG1] | CDRH2 | 2.78 | No | Yes |
| 2 | Y421 [OH] | S53 [O] | CDRH2 | 2.73 | No | Yes |
| 3 | Y453 [OH] | D98 [OD1] | CDRH3 | 3.5 | No | Yes |
| 4 | L455 [O] | Y33 [OH] | CDRH1 | 3.29 | No | Yes |
| 5 | R457 [O] | S53 [OG] | CDRH2 | 3.25 | No | Yes |
| 6 | Y473 [OH] | R31 [O] | CDRH1 | 2.76 | No | Yes |
| 7 | Y473 [OH] | S53 [OG] | CDRH2 | 3.26 | No | Yes |
| 8 | Q474 [O] | R31 [NH1] | CDRH1 | 3.08 | No | Yes |
| 9 | A475 [O] | L28 [N] | CDRH1 | 3.05 | No | Yes |
| 10 | A475 [O] | N32 [ND2] | CDRH1 | 2.98 | No | Yes |
| 11 | E484 [OE2] | Y99 [OH] | CDRH3 | 2.61 | Yes | No |
| 12 | N487 [ND2] | G26 [O] | FR1 | 3.01 | No | Yes |
| 13 | C488 [O] | Y99 [OH] | CDRH3 | 3.25 | No | Yes |
| 14 | Y489 [OH] | R94 [NH1] | FR3 | 2.64 | No | Yes |
| 15 | Y505 [OH] | Q31 [NE2] | CDRL1 | 2.62 | Yes | No |

[0506] Table S6. Cryo-EM data collection, refinement and model building statistics. Related to FIG. 9 and FIG. 15.

| | S728-1157 + SARS-CoV-2- | S728-1157 + SARS-CoV-2- |
|---|---|---|
| | 6P-Mut7 (global | 6P-Mut7 (focused |
| Map | refinement) | refinement) |
| EMDB | EMD-27112 | EMD-27113 |

Data collection

| | |
|---|---|
| Microscope | Thermo Fisher Titan Krios |
| Voltage (kV) | 300 |
| Detector | Gatan K2 Summit |
| Recording mode | Counting |
| Nominal magnification | 130kx |
| Movie micrograph pixelsize (Å) | 1.045 |
| Dose rate (e⁻/[(camera pixel)*s]) | 6.017 |
| Number of frames per movie micrograph | 36 |
| Frame exposure time (ms) | 250 |
| Movie micrograph exposure time (s) | 9 |
| Total dose (e⁻/Å²) | 50.0 |
| Defocus range (μm) | −0.8 to −1.5 |

EM data processing

| | | |
|---|---|---|
| Number of movie micrographs | 1,718 | 1,718 |
| Number of molecular projection images | 151,948 | 29,595 |
| in map | | |
| Symmetry | C1 | C1 |
| Map resolution (FSC 0.143; Å) | 3.3 | 3.7 |
| Map sharpening B-factor (Å²) | −85.3 | −71.1 |

Structure Building and Validation
Number of atoms in deposited model

| | | |
|---|---|---|
| SARS-CoV-2-6P-Mut7 | n/a | 20,759 |
| Fab Fv | n/a | 1,653 |
| Glycans | n/a | 182 |
| MolProbity score | n/a | 1.07 |
| Clashscore | n/a | 1.66 |
| Map correlation coefficient | n/a | 0.75 |
| EMRinger score | n/a | 2.57 |
| d FSC model (0.5; Å) | n/a | 3.8 |

RMSD from ideal

| | | |
|---|---|---|
| Bond length (Å) | n/a | 0.021 |
| Bond angles (°) | n/a | 1.81 |

Ramachandran plot

| | | |
|---|---|---|
| Favored (%) | n/a | 97.13 |
| Allowed (%) | n/a | 2.87 |
| Outliers (%) | n/a | 0.00 |
| Side chain rotamer outliers (%) | n/a | 0.08 |
| Cβ outliers (%) | n/a | 0.00 |
| PDB | n/a | 8d0z |

### E. References

[0507] The following references and the references cited throughout the specification, to the extent that they provide exemplary procedural or other details supplementary to those set forth herein, are specifically incorporated herein by reference.
[0508] 1. Hou, Y. J. et al. SARS-CoV-2 D614G variant exhibits efficient replication ex vivo and transmission in vivo. Science 370, 1464-1468, doi: 10.1126/science.abe8499 (2020).
[0509] 2. Garcia-Beltran, W. F. et al. Multiple SARS-CoV-2 variants escape neutralization by vaccine-induced humoral immunity. Cell 184, 2523, doi: 10.1016/j.cell.2021.04.006 (2021).
[0510] 3. Wall, E. C. et al. Neutralising antibody activity against SARS-CoV-2 VOCs B.1.617.2 and B.1.351 by BNT162b2 vaccination. Lancet 397, 2331-2333, doi: 10.1016/S0140-6736 (21) 01290-3 (2021).
[0511] 4. Edara, V. V. et al. Infection and vaccine-induced neutralizing-antibody responses to the SARS-CoV-2 B.1.617 variants. N Engl J Med 385, 664-666, doi: 10.1056/NEJMc2107799 (2021).
[0512] 5. Zhou, D. et al. Evidence of escape of SARS-CoV-2 variant B.1.351 from natural and vaccine-induced sera. Cell 184, 2348-2361 e2346, doi: 10.1016/j.cell.2021.02.037 (2021).
[0513] 6. Weisblum, Y. et al. Escape from neutralizing antibodies by SARS-CoV-2 spike protein variants. eLife 9, e61312, doi: 10.7554/eLife.61312 (2020).
[0514] 7. Graham, F. Daily briefing: Omicron coronavirus variant puts scientists on alert. Nature, doi: 10.1038/d41586-021-03564-6 (2021).
[0515] 8. Karim, S. S. A. & Karim, Q. A. Omicron SARS-CoV-2 variant: a new chapter in the COVID-19 pandemic. Lancet 398, 2126-2128, doi: 10.1016/S0140-6736 (21) 02758-6 (2021).
[0516] 9. Carreño, J. M. et al. Activity of convalescent and vaccine serum against SARS-CoV-2 Omicron. Nature 602, 682-688, doi: 10.1038/s41586-022-04399-5 (2021).
[0517] 10. VanBlargan, L. A. et al. An infectious SARS-CoV-2 B.1.1.529 Omicron virus escapes neutralization by therapeutic monoclonal antibodies. Nat Med 28, 490-495, doi: 10.1038/s41591-021-01678-y (2022).
[0518] 11. Takashita, E. et al. Efficacy of antibodies and antiviral drugs against COVID-19 Omicron variant. N Engl J Med 386, 995-998, doi: 10.1056/NEJMc2119407 (2022).
[0519] 12. Changrob, S. et al. Cross-neutralization of emerging SARS-CoV-2 variants of concern by antibodies targeting distinct epitopes on spike. mBio 12, e0297521, doi: 10.1128/mBio.02975-21 (2021).
[0520] 13. Guthmiller, J. J. et al. SARS-CoV-2 infection severity is linked to superior humoral immunity against the spike. mBio 12, e02940-02920, doi: 10.1128/mBio.02940-20 (2021).
[0521] 14. Greaney, A. J. et al. Mapping mutations to the SARS-CoV-2 RBD that escape binding by different classes of antibodies. Nat Commun 12, 4196, doi: 10.1038/s41467-021-24435-8 (2021).
[0522] 15. Liu, H. & Wilson, I. A. Protective neutralizing epitopes in SARS-CoV-2. Immunol Rev, doi: 10.1111/imr.13084 (2022).
[0523] 16. Jette, C. A. et al. Broad cross-reactivity across sarbecoviruses exhibited by a subset of COVID-19 donor-derived neutralizing antibodies. Cell Rep 36, 109760, doi: 10.1016/j.celrep.2021.109760 (2021).
[0524] 17. Brouwer, P. J. M. et al. Potent neutralizing antibodies from COVID-19 patients define multiple targets of vulnerability. Science 369, 643-650, doi: 10.1126/science.abc5902 (2020).
[0525] 18. Pinto, D. et al. Cross-neutralization of SARS-CoV-2 by a human monoclonal SARS-CoV antibody. Nature 583, 290-295, doi: 10.1038/s41586-020-2349-y (2020).
[0526] 19. Robbiani, D. F. et al. Convergent antibody responses to SARS-CoV-2 in convalescent individuals. Nature 584, 437-442, doi: 10.1038/s41586-020-2456-9 (2020).
[0527] 20. Yuan, M. et al. Structural basis of a shared antibody response to SARS-CoV-2. Science 369, 1119-1123, doi: 10.1126/science.abd2321 (2020).
[0528] 21. Dugan, H. L. et al. Profiling B cell immunodominance after SARS-CoV-2 infection reveals antibody evolution to non-neutralizing viral targets. Immunity 54, 1290-1303, doi: 10.1016/j.immuni.2021.05.001. (2021).
[0529] 22. Rogers, T. F. et al. Isolation of potent SARS-CoV-2 neutralizing antibodies and protection from disease in a small animal model. Science 369, 956-963, doi: 10.1126/science.abc7520 (2020).
[0530] 23. Schmitz, A. J. et al. A vaccine-induced public antibody protects against SARS-CoV-2 and emerging variants. Immunity 54, 2159-2166.e6, doi: 10.1016/j.immuni.2021.08.013 (2021).
[0531] 24. Shi, R. et al. A human neutralizing antibody targets the receptor-binding site of SARS-CoV-2. Nature 584, 120-124, doi: 10.1038/s41586-020-2381-y (2020).
[0532] 25. Yuan, M., Liu, H., Wu, N. C. & Wilson, I. A. Recognition of the SARS-CoV-2 receptor binding domain by neutralizing antibodies. Biochem Biophys Res Commun 538, 192-203, doi: 10.1016/j.bbrc.2020.10.012 (2021).
[0533] 26. Cao, Y. et al. Potent neutralizing antibodies against SARS-CoV-2 identified by high-throughput single-cell sequencing of convalescent patients' B cells. Cell 182, 73-84.e16, doi: 10.1016/j.cell.2020.05.025 (2020).
[0534] 27. Barnes, C. O. et al. Structures of human antibodies bound to SARS-CoV-2 spike reveal epitopes and recurrent features of antibodies. Cell 182, 828-842.e6, common doi: 10.1016/j.cell.2020.06.025 (2020).
[0535] 28. Corbett, K. S. et al. SARS-CoV-2 mRNA vaccine design enabled by prototype pathogen preparedness. Nature 586, 567-571, doi: 10.1038/s41586-020-2622-0 (2020).
[0536] 29. Amanat, F. et al. Introduction of two prolines and removal of the polybasic cleavage site lead to higher efficacy of a recombinant spike-based SARS-CoV-2 vaccine in the mouse model. mBio 12, doi: 10.1128/mBio.02648-20 (2021).
[0537] 30 Sun, W. et al. A Newcastle disease virus expressing a stabilized spike protein of SARS-CoV-2 induces protective immune responses. Nat Commun 12, 6197, doi: 10.1038/s41467-021-26499-y (2021).
[0538] 31. Hsieh, C. L. et al. Structure-based design of prefusion-stabilized SARS-CoV-2 spikes. Science 369, 1501-1505, doi: 10.1126/science.abd0826 (2020).
[0539] 32. Yuan, M. et al. A highly conserved cryptic epitope in the receptor binding domains of SARS-CoV-2 and SARS-CoV. Science 368, 630-633, doi: 10.1126/science.abb7269 (2020).
[0540] 33. Rogers, T. F. et al. Isolation of potent SARS-CoV-2 neutralizing antibodies and protection from disease in a small animal model. Science 369, 956-963, doi: 10.1126/science.abc7520 (2020).
[0541] 34. Starr, T. N., Greaney, A. J., Dingens, A. S. & Bloom, J. D. Complete map of SARS-CoV-2 RBD mutations that escape the monoclonal antibody LY-CoV555 and its cocktail with LY-CoV016. Cell Rep Med 2, 100255, doi: 10.1016/j.xcrm.2021.100255 (2021).
[0542] 35 Baum, A. et al. REGN-CoV2 antibodies prevent and treat SARS-CoV-2 infection in rhesus macaques and hamsters. Science 370, 1110-1115, doi: 10.1126/science.abe2402 (2020).
[0543] 36. Yuan, M. et al. Structural basis of a shared antibody response to SARS-CoV-2. Science 369, 1119-1123, doi: 10.1126/science.abd2321 (2020).
[0544] 37 Wu, N. C. et al. An alternative binding mode of IGHV3-53 antibodies to the SARS-CoV-2 receptor binding domain. Cell Rep 33, 108274, doi: 10.1016/j.celrep.2020.108274 (2020).
[0545] 38. Wu, Y. et al. A noncompeting pair of human neutralizing antibodies block COVID-19 virus binding to its receptor ACE2. Science 368, 1274-1278, doi: 10.1126/science.abc2241 (2020).
[0546] 39 Yuan, M. et al. Structural and functional ramifications of antigenic drift in recent SARS-CoV-2 variants. Science 373, 818-823, doi: 10.1126/science.abh1139 (2021).
[0547] 40. Gobeil, S. M. et al. Structural diversity of the SARS-CoV-2 Omicron spike. Mol Cell 82, 2050-2068.e6, doi: 10.1016/j.molcel.2022.03.028 (2022).
[0548] 41. Yan, Q. et al. Germline IGHV3-53-encoded RBD-targeting neutralizing antibodies are commonly present in the antibody repertoires of COVID-19 patients. Emerg Microbes Infect 10, 1097-1111, doi: 10.1080/22221751.2021.1925594 (2021).
[0549] 42. Barnes, C. O. et al. SARS-CoV-2 neutralizing antibody structures inform therapeutic strategies. Nature 588, 682-687, doi: 10.1038/s41586-020-2852-1 (2020).
[0550] 43. Zhang, Q. et al. Potent and protective IGHV3-53/3-66 public antibodies and their shared escape mutant on the spike of SARS-CoV-2. Nat Commun 12, 4210, doi: 10.1038/s41467-021-24514-w (2021).
[0551] 44. Wang, Z. et al. mRNA vaccine-elicited antibodies to SARS-CoV-2 and circulating variants. Nature 592, 616-622, doi: 10.1038/s41586-021-03324-6 (2021).
[0552] 45. Starr, T. N. et al. SARS-CoV-2 RBD antibodies that maximize breadth and resistance to escape. Nature 597, 97-102, doi: 10.1038/s41586-021-03807-6 (2021).
[0553] 46. Walls, A. C. et al. Structure, function, and antigenicity of the SARS-CoV-2 spike glycoprotein. Cell 181, 281-292.e6, doi: 10.1016/j.cell.2020.02.058 (2020).
[0554] 47. Henderson, R. et al. Controlling the SARS-CoV-2 spike glycoprotein conformation. Nat Struct Mol Biol 27, 925-933, doi: 10.1038/s41594-020-0479-4 (2020).
[0555] 48. Shrestha, L. B., Tedla, N. & Bull, R. A. Broadly-neutralizing antibodies against emerging SARS-CoV-2 variants. Front Immunol 12, 752003, doi: 10.3389/fimmu.2021.752003 (2021).
[0556] 49. Greaney, A. J. et al. Antibodies elicited by mRNA-1273 vaccination bind more broadly to the receptor binding domain than do those from SARS-CoV-2 infection. Sci Transl Med 13, eabi9915, doi: 10.1126/scitranslmed.abi9915 (2021).
[0557] 50 Reincke, S. M. et al. SARS-CoV-2 Beta variant infection elicits potent lineage-specific and cross-reactive antibodies. Science 375, 782-787, doi: 10.1126/science.abm5835 (2022).
[0558] 51. Wrammert, J. et al. Broadly cross-reactive antibodies dominate the human B cell response against 2009 pandemic H1N1 influenza virus infection. J Exp Med 208, 181-193, doi: 10.1084/jem.20101352 (2011).
[0559] 52. Guthmiller, J. J. et al. First exposure to the pandemic H1N1 virus induced broadly neutralizing antibodies targeting hemagglutinin head epitopes. Sci Transl Med 13, eabg4535, doi: 10.1126/scitranslmed.abg4535 (2021).
[0560] 53 Bajic, G. et al. Influenza antigen engineering focuses immune responses to a subdominant but broadly protective viral epitope. Cell Host Microbe 25, 827-835.e6, doi: 10.1016/j.chom.2019.04.003 (2019).
[0561] 54. Nachbagauer, R. et al. A chimeric hemagglutinin-based universal influenza virus vaccine approach induces broad and long-lasting immunity in a randomized, placebo-controlled phase I trial. Nat Med 27, 106-114, doi: 10.1038/s41591-020-1118-7 (2021).
[0562] 55. Angeletti, D. et al. Outflanking immunodominance to target subdominant broadly neutralizing epitopes. Proc Natl Acad Sci USA 116, 13474-13479, doi: 10.1073/pnas. 1816300116 (2019).
[0563] 56. Guthmiller, J. J., Dugan, H. L., Neu, K. E., Lan, L. Y. & Wilson, P. C. An efficient method to generate monoclonal antibodies from human B cells. Methods Mol Biol 1904, 109-145, doi: 10.1007/978-1-4939-8958-4_5 (2019).
[0564] 57. Amanat, F. et al. A serological assay to detect SARS-CoV-2 seroconversion in humans. Nat Med 26, 1033-1036, doi: 10.1038/s41591-020-0913-5 (2020).
[0565] 58. Stadlbauer, D. et al. SARS-CoV-2 seroconversion in humans: A detailed protocol for a serological assay, antigen production, and test setup. Curr Protoc Microbiol 57, e100, doi: 10.1002/cpmc.100 (2020).
[0566] 59. Torres, J. L. et al. Structural insights of a highly potent pan-neutralizing SARS-CoV-2 human monoclonal antibody. Proc Natl Acad Sci USA 119, e2120976119, doi: 10.1073/pnas.2120976119 (2022).
[0567] 60. Suloway, C. et al. Automated molecular microscopy: the new Leginon system. J Struct Biol 151, 41-60, doi: 10.1016/j.jsb.2005.03.010 (2005).
[0568] 61. Lander, G. C. et al. Appion: an integrated, database-driven pipeline to facilitate EM image processing. J Struct Biol 166, 95-102, doi: 10.1016/j.jsb.2009.01.002 (2009).
[0569] 62. Voss, N. R., Yoshioka, C. K., Radermacher, M., Potter, C. S. & Carragher, B. DoG Picker and TiltPicker: software tools to facilitate particle selection in single particle electron microscopy. J Struct Biol 166, 205-213, doi: 10.1016/j.jsb.2009.01.004 (2009).
[0570] 63 Pettersen, E. F. et al. UCSF Chimera-A visualization system for exploratory research and analysis. J Comput Chem 25, 1605-1612, doi: 10.1002/jcc.20084 (2004).
[0571] 64. Punjani, A., Zhang, H. & Fleet, D. J. Non-uniform refinement: adaptive regularization improves single-particle cryo-EM reconstruction. Nat Methods 17, 1214-1221, doi: 10.1038/s41592-020-00990-8 (2020).
[0572] 65. Zhang, K. Gctf: Real-time CTF determination and correction. J Struct Biol 193, 1-12, doi: 10.1016/j.jsb.2015.11.003 (2016).
[0573] 66. Zivanov, J. et al. New tools for automated high-resolution cryo-EM structure determination in RELION-3. eLife 7, e42166, doi: 10.7554/eLife.42166 (2018).
[0574] 67. Casanal, A., Lohkamp, B. & Emsley, P. Current developments in Coot for macromolecular model building of electron cryo-microscopy and crystallographic data. Protein Sci 29, 1069-1078, doi: 10.1002/pro.3791 (2020).
[0575] 68. Frenz, B. et al. Automatically fixing errors in glycoprotein structures with Rosetta. Structure 27, 134-139.e3, doi: 10.1016/j.str.2018.09.006 (2019).
[0576] 69. Klaholz, B. P. Deriving and refining atomic models in crystallography and cryo-EM: the latest Phenix tools to facilitate structure analysis. Acta Crystallogr D Struct Biol 75, 878-881, doi: 10.1107/S2059798319013391 (2019).
[0577] 70. Pettersen, E. F. et al. UCSF ChimeraX: Structure visualization for researchers, educators, and developers. Protein Sci 30, 70-82, doi: 10.1002/pro.3943 (2021).
[0578] 71. Otwinowski, Z. & Minor, W. Processing of X-ray diffraction data collected in oscillation mode. Methods Enzymol 276, 307-326 (1997).
[0579] 72. McCoy, A. J. et al. Phaser crystallographic software. J Appl Crystallogr 40, 658-674, doi: 10.1107/S0021889807021206 (2007).
[0580] 73 Qiang, M. et al. Neutralizing antibodies to SARS-CoV-2 selected from a human antibody library constructed decades ago. Adv Sci (Weinh) 9, e2102181, doi: 10.1002/advs.202102181 (2022).
[0581] 74. Emsley, P. & Cowtan, K. Coot: model-building tools for molecular graphics. Acta Crystallogr D Biol Crystallogr 60, 2126-2132, doi: 10.1107/S0907444904019158 (2004).
[0582] 75. Adams, P. D. et al. PHENIX: a comprehensive Python-based system for macromolecular structure solution. Acta Crystallogr D Biol Crystallogr 66, 213-221, doi: 10.1107/S0907444909052925 (2010).
[0583] 76. Montiel-Garcia, D., Rojas-Labra, O., Santoyo-Rivera, N. & Reddy, V. S. Epitope-Analyzer: A structure-based webtool to analyze broadly neutralizing epitopes. J Struct Biol 214, 107839, doi: 10.1016/j.jsb.2022.107839 (2022).

[0584] All of the methods disclosed and claimed herein can be made and executed without undue experimentation in light of the present disclosure. While the compositions and methods of this invention have been described in terms of preferred embodiments, it will be apparent to those of skill in the art that variations may be applied to the methods and in the steps or in the sequence of steps of the method described herein without departing from the concept, spirit and scope of the invention. More specifically, it will be apparent that certain agents which are both chemically and physiologically related may be substituted for the agents described herein while the same or similar results would be achieved. All such similar substitutes and modifications apparent to those skilled in the art are deemed to be within the spirit, scope and concept of the invention as defined by the appended claims.

The application's sequence listing, which the Patent Office published only in electronic form, follows.

SEQUENCE LISTING (1894 sequences)

SEQ ID NO: 1 - protein, 182 aa, Homo sapiens
QVQLQESGPGLVRPSETLSLTCTVSGGSISSHYWSWIRQPPGKGLEWIGYIYYSGSTNYNPSLKSRVTISVDTSKNQFSLKLISVTAADTAVYYCARAGGVFGVVLDFDHWGRGTLVTVSSASTKGPSVFPLAPSSKSTSGGTAALGCLVKDYFPEPVTVSWNSGALTSGVHTFPAVLQSSG

SEQ ID NO: 2 - protein, 121 aa, Homo sapiens
QVQLQESGPGLVRPSETLSLTCTVSGGSISSHYWSWIRQPPGKGLEWIGYIYYSGSTNYNPSLKSRVTISVDTSKNQFSLKLISVTAADTAVYYCARAGGVFGVVLDFDHWGRGTLVTVSS

SEQ ID NO: 3 - protein, 5 aa, Homo sapiens
SHYWS

SEQ ID NO: 4 - protein, 16 aa, Homo sapiens
YIYYSGSTNYNPSLKS

SEQ ID NO: 5 - protein, 13 aa, Homo sapiens
AGGVFGVVLDFDH

SEQ ID NO: 6 - protein, 30 aa, Homo sapiens
QVQLQESGPGLVRPSETLSLTCTVSGGSIS

SEQ ID NO: 7 - protein, 14 aa, Homo sapiens
WIRQPPGKGLEWIG

SEQ ID NO: 8 - protein, 32 aa, Homo sapiens
RVTISVDTSKNQFSLKLISVTAADTAVYYCAR

SEQ ID NO: 9 - protein, 11 aa, Homo sapiens
WGRGTLVTVSS

SEQ ID NO: 10 - protein, 178 aa, Homo sapiens
SYVLTQPPSVSVAPGQTARITCGGNNIGSKSVHWYQQKPGQAPVLVVYDDSDRPSGIPERFSGSNSGNTATLTISRVEAGDEADYYCQVWDSSSEHYVFGTGTKVTVLGQPKANPTVTLFPPSSEELQANKATLVCLISDFYPGAVTVAWKADGSPVKAGVETTKPSKQSNNKYAASS

SEQ ID NO: 11 - protein, 108 aa, Homo sapiens
SYVLTQPPSVSVAPGQTARITCGGNNIGSKSVHWYQQKPGQAPVLVVYDDSDRPSGIPERFSGSNSGNTATLTISRVEAGDEADYYCQVWDSSSEHYVFGTGTKVTVL

SEQ ID NO: 12 - protein, 11 aa, Homo sapiens
GGNNIGSKSVH

SEQ ID NO: 13 - protein, 7 aa, Homo sapiens
DDSDRPS

SEQ ID NO: 14 - protein, 11 aa, Homo sapiens
QVWDSSSEHYV

SEQ ID NO: 15 - protein, 22 aa, Homo sapiens
SYVLTQPPSVSVAPGQTARITC

SEQ ID NO: 16 - protein, 15 aa, Homo sapiens
WYQQKPGQAPVLVVY

SEQ ID NO: 17 - protein, 32 aa, Homo sapiens
GIPERFSGSNSGNTATLTISRVEAGDEADYYC

SEQ ID NO: 18 - protein, 10 aa, Homo sapiens
FGTGTKVTVL

SEQ ID NO: 19 - protein, 183 aa, Homo sapiens
QVQLQESGPGLVKPSETLSLTCTVSGGSISSFYWGWIRQPAGKGLEWIGRFHTSGSTNYNPSFKSRVTMSVDTSKNQFSLKLTSVTAADTAVYYCASGRGSSWYVGWFFDLWGRGTLVTVSSASTKGPSVFPLAPSSKSTSGGTAALGCLVKDYFPEPVTVSWNSGALTSGVHTFPAVLQSSG

SEQ ID NO: 20 - protein, 122 aa, Homo sapiens
QVQLQESGPGLVKPSETLSLTCTVSGGSISSFYWGWIRQPAGKGLEWIGRFHTSGSTNYNPSFKSRVTMSVDTSKNQFSLKLTSVTAADTAVYYCASGRGSSWYVGWFFDLWGRGTLVTVSS

SEQ ID NO: 21 - protein, 5 aa, Homo sapiens
SFYWG

SEQ ID NO: 22 - protein, 16 aa, Homo sapiens
RFHTSGSTNYNPSFKS

SEQ ID NO: 23 - protein, 14 aa, Homo sapiens
GRGSSWYVGWFFDL

SEQ ID NO: 24 - protein, 30 aa, Homo sapiens
QVQLQESGPGLVKPSETLSLTCTVSGGSIS

SEQ ID NO: 25 - protein, 14 aa, Homo sapiens
WIRQPAGKGLEWIG

SEQ ID NO: 26 - protein, 32 aa, Homo sapiens
RVTMSVDTSKNQFSLKLTSVTAADTAVYYCAS

SEQ ID NO: 27 - protein, 158 aa, Homo sapiens
DIVMTQSPDSLAVSLGERATINCKSSQTVLYSSNNKNYLAWYQQKPGQPPKLLIYWASTRESGVPDRFSGSGSGTDFTLTISSLQAGDVAVYYCQQYYNTPDTFGGGTKVEINRTVAAPSVFIFPPSDEQLKSGTASVVCLLNNFYPREAKVQWKVDN

SEQ ID NO: 28 - protein, 112 aa, Homo sapiens
DIVMTQSPDSLAVSLGERATINCKSSQTVLYSSNNKNYLAWYQQKPGQPPKLLIYWASTRESGVPDRFSGSGSGTDFTLTISSLQAGDVAVYYCQQYYNTPDTFGGGTKVEI

SEQ ID NO: 29 - protein, 17 aa, Homo sapiens
KSSQTVLYSSNNKNYLA

SEQ ID NO: 30 - protein, 7 aa, Homo sapiens
WASTRES

SEQ ID NO: 31 - protein, 9 aa, Homo sapiens
QQYYNTPDT

SEQ ID NO: 32 - protein, 23 aa, Homo sapiens
DIVMTQSPDSLAVSLGERATINC

SEQ ID NO: 33 - protein, 15 aa, Homo sapiens
WYQQKPGQPPKLLIY

SEQ ID NO: 34 - protein, 32 aa, Homo sapiens
GVPDRFSGSGSGTDFTLTISSLQAGDVAVYYC

SEQ ID NO: 35 - protein, 9 aa, Homo sapiens
FGGGTKVEI

SEQ ID NO: 36 - protein, 183 aa, Homo sapiens
QVQLIQSGAEVKKPGASVKVSCTASGYSLNELPIQWVRQAPGKGLEWMGEFDPEDGETIYAEKFQGRVTLTEETSTNTAYMELSSLKSEDTAAYFCSTGSTIGVVIYAFAIWGQGTMVTVSSASTKGPSVFPLAPCSRSTSESTAALGCLVKDYFPEPVTVSWNSGALTSGVHTFPAVLQSSG

SEQ ID NO: 37 - protein, 122 aa, Homo sapiens
QVQLIQSGAEVKKPGASVKVSCTASGYSLNELPIQWVRQAPGKGLEWMGEFDPEDGETIYAEKFQGRVTLTEETSTNTAYMELSSLKSEDTAAYFCSTGSTIGVVIYAFAIWGQGTMVTVSS

SEQ ID NO: 38 - protein, 5 aa, Homo sapiens
ELPIQ

SEQ ID NO: 39 - protein, 17 aa, Homo sapiens
EFDPEDGETIYAEKFQG

SEQ ID NO: 40 - protein, 13 aa, Homo sapiens
GSTIGVVIYAFAI

SEQ ID NO: 41 - protein, 30 aa, Homo sapiens
QVQLIQSGAEVKKPGASVKVSCTASGYSLN

SEQ ID NO: 42 - protein, 14 aa, Homo sapiens
WVRQAPGKGLEWMG

SEQ ID NO: 43 - protein, 32 aa, Homo sapiens
RVTLTEETSTNTAYMELSSLKSEDTAAYFCST

SEQ ID NO: 44 - protein, 11 aa, Homo sapiens
WGQGTMVTVSS

SEQ ID NO: 45 - protein, 187 aa, Homo sapiens
EIVLTQSPGTLSLSPGERATLSCRASQDITNNFLAWYQQKAGQAPKLFIYGASRRAPGIPHRFSGSGSGTDFTLTISSLEPEDFAVYYCQQYGPSPTFGQGTKVEIKRTVAAPSVFIFPPSDEQLKSGTASVVCLLNNFYPREAKVQWKVDNALQSGNSQESVTEQDSKDSTYSLSSTLTLSKADYE

SEQ ID NO: 46 - protein, 107 aa, Homo sapiens
EIVLTQSPGTLSLSPGERATLSCRASQDITNNFLAWYQQKAGQAPKLFIYGASRRAPGIPHRFSGSGSGTDFTLTISSLEPEDFAVYYCQQYGPSPTFGQGTKVEIK

SEQ ID NO: 47 - protein, 12 aa, Homo sapiens
RASQDITNNFLA

SEQ ID NO: 48 - protein, 7 aa, Homo sapiens
GASRRAP

SEQ ID NO: 49 - protein, 8 aa, Homo sapiens
QQYGPSPT

SEQ ID NO: 50 - protein, 23 aa, Homo sapiens
EIVLTQSPGTLSLSPGERATLSC

SEQ ID NO: 51 - protein, 15 aa, Homo sapiens
WYQQKAGQAPKLFIY

SEQ ID NO: 52 - protein, 32 aa, Homo sapiens
GIPHRFSGSGSGTDFTLTISSLEPEDFAVYYC

SEQ ID NO: 53 - protein, 10 aa, Homo sapiens
FGQGTKVEIK

SEQ ID NO: 54 - protein, 141 aa, Homo sapiens
QVQLQESGPGLVKPSETLSLTCTVSGGSISSYYWSWIRQPAGKGLEWIGRIYTSGSTNYNPSLKSRVTMSVDTSKNQFSLKLSSVTAADTAVYYCARGGSGWRFDYWGQGTLVTVSSGSASAPTLFPLVSCENSPSDTSSV

SEQ ID NO: 55 - protein, 117 aa, Homo sapiens
QVQLQESGPGLVKPSETLSLTCTVSGGSISSYYWSWIRQPAGKGLEWIGRIYTSGSTNYNPSLKSRVTMSVDTSKNQFSLKLSSVTAADTAVYYCARGGSGWRFDYWGQGTLVTVSS

SEQ ID NO: 56 - protein, 5 aa, Homo sapiens
SYYWS

SEQ ID NO: 57 - protein, 16 aa, Homo sapiens
RIYTSGSTNYNPSLKS

SEQ ID NO: 58 - protein, 9 aa, Homo sapiens
GGSGWRFDY

SEQ ID NO: 59 - protein, 32 aa, Homo sapiens
RVTMSVDTSKNQFSLKLSSVTAADTAVYYCAR

SEQ ID NO: 60 - protein, 11 aa, Homo sapiens
WGQGTLVTVSS

SEQ ID NO: 61 - protein, 181 aa, Homo sapiens
QSALTQPASVSGSPGQSITISCTGTSSDVGGYNYVSWYQQHPGKAPKLMIYDVSNRPSGVSNRFSGSKSGNTASLTISGLQAEDEADYYCSSYTSSSTLGVFGGGTKLTVLGQPKAAPSVTLFPPSSEELQANKATLVCLISDFYPGAVTVAWKADSSPVKAGVETTTPSKQSNNKYAASS

SEQ ID NO: 62 - protein, 111 aa, Homo sapiens
QSALTQPASVSGSPGQSITISCTGTSSDVGGYNYVSWYQQHPGKAPKLMIYDVSNRPSGVSNRFSGSKSGNTASLTISGLQAEDEADYYCSSYTSSSTLGVFGGGTKLTVL

SEQ ID NO: 63 - protein, 14 aa, Homo sapiens
TGTSSDVGGYNYVS

SEQ ID NO: 64 - protein, 7 aa, Homo sapiens
DVSNRPS

SEQ ID NO: 65 - protein, 11 aa, Homo sapiens
SSYTSSSTLGV

SEQ ID NO: 66 - protein, 22 aa, Homo sapiens
QSALTQPASVSGSPGQSITISC

SEQ ID NO: 67 - protein, 15 aa, Homo sapiens
WYQQHPGKAPKLMIY

SEQ ID NO: 68 - protein, 32 aa, Homo sapiens
GVSNRFSGSKSGNTASLTISGLQAEDEADYYC

SEQ ID NO: 69 - protein, 10 aa, Homo sapiens
FGGGTKLTVL

SEQ ID NO: 70 - protein, 184 aa, Homo sapiens
QVQLQESGPGLVKPSQTLSLTCTVSGGSINSGDYYWSWIRQPPGKGLEWIGYIYFSGSTYYNPSLKSRVTISLDRSKNQFSLKLSSVTAADTAVYYCAREESMITLGGVIVDWGQGTLVTVSSASTKGPSVFPLAPSSKSTSGGTAALGCLVKDYFPEPVTVSWNSGALTSGVHTFPAVLQSSG

SEQ ID NO: 71 - protein, 123 aa, Homo sapiens
QVQLQESGPGLVKPSQTLSLTCTVSGGSINSGDYYWSWIRQPPGKGLEWIGYIYFSGSTYYNPSLKSRVTISLDRSKNQFSLKLSSVTAADTAVYYCAREESMITLGGVIVDWGQGTLVTVSS

SEQ ID NO: 72 - protein, 7 aa, Homo sapiens
SGDYYWS

SEQ ID NO: 73 - protein, 16 aa, Homo sapiens
YIYFSGSTYYNPSLKS

SEQ ID NO: 74 - protein, 13 aa, Homo sapiens
EESMITLGGVIVD

SEQ ID NO: 75 - protein, 30 aa, Homo sapiens
QVQLQESGPGLVKPSQTLSLTCTVSGGSIN

SEQ ID NO: 76 - protein, 32 aa, Homo sapiens
RVTISLDRSKNQFSLKLSSVTAADTAVYYCAR

SEQ ID NO: 77 - protein, 192 aa, Homo sapiens
DIVMTQTPLSSPVTLGQPASISCRSSQSLVHSDGDTYLSWLQQRPGQPPRLLIYKISNRFSGVPDRFSGSGAGTDFTLKISRVEAEDVGVYYCMQATQFPLTFGGGTKVEIKRTVAAPSVFIFPPSDEQLKSGTASVVCLLNNFYPREAKVQWKVDNALQSGNSQESVTEQDSKDSTYSLSSTLTLSKADYE

SEQ ID NO: 78 - protein, 112 aa, Homo sapiens
DIVMTQTPLSSPVTLGQPASISCRSSQSLVHSDGDTYLSWLQQRPGQPPRLLIYKISNRFSGVPDRFSGSGAGTDFTLKISRVEAEDVGVYYCMQATQFPLTFGGGTKVEIK

SEQ ID NO: 79 - protein, 16 aa, Homo sapiens
RSSQSLVHSDGDTYLS

SEQ ID NO: 80 - protein, 7 aa, Homo sapiens
KISNRFS

SEQ ID NO: 81 - protein, 9 aa, Homo sapiens
MQATQFPLT

SEQ ID NO: 82 - protein, 23 aa, Homo sapiens
DIVMTQTPLSSPVTLGQPASISC

SEQ ID NO: 83 - protein, 15 aa, Homo sapiens
WLQQRPGQPPRLLIY

SEQ ID NO: 84 - protein, 32 aa, Homo sapiens
GVPDRFSGSGAGTDFTLKISRVEAEDVGVYYC

SEQ ID NO: 85 - protein, 10 aa, Homo sapiens
FGGGTKVEIK

SEQ ID NO: 86 - protein, 182 aa, Homo sapiens
QVQLQESGPGLVKPSETLSLTCTVSGGSISSHYWSWIRQPPGKGLEQIGYMYYSGSTNYNPSLKSRVIISVDTSKNQFSLKLSSVTAADTAVYYCAGRDQLLYGADGFDIWGQGTMVTVSSASTKGPSVFPLAPSSKSTSGGTAALGCLVKDYFPEPVTVSWNSGALTSGVHTFPAVLQSSG

SEQ ID NO: 87 - protein, 121 aa, Homo sapiens
QVQLQESGPGLVKPSETLSLTCTVSGGSISSHYWSWIRQPPGKGLEQIGYMYYSGSTNYNPSLKSRVIISVDTSKNQFSLKLSSVTAADTAVYYCAGRDQLLYGADGFDIWGQGTMVTVSS

SEQ ID NO: 88 - protein, 16 aa, Homo sapiens
YMYYSGSTNYNPSLKS

SEQ ID NO: 89 - protein, 13 aa, Homo sapiens
RDQLLYGADGFDI

SEQ ID NO: 90 - protein, 14 aa, Homo sapiens
WIRQPPGKGLEQIG

SEQ ID NO: 91 - protein, 32 aa, Homo sapiens
RVIISVDTSKNQFSLKLSSVTAADTAVYYCAG

SEQ ID NO: 92 - protein, 181 aa, Homo sapiens
QSALTQPPSASGSPGQSVTISCTGTSSDVGGYNYVSWYQQHPGKAPKLMIYEVSKRPSGVPDRYSGSKSGNTASLTVSGLQAEDEADYYCSSYAGSSNHVIFGGGTKLTVLGQPKAAPSVTLFPPSSEELQANKATLVCLISDFYPGAVTVAWKADSSPVKAGVETTTPSKQSNNKYAASS

SEQ ID NO: 93 - protein, 111 aa, Homo sapiens
QSALTQPPSASGSPGQSVTISCTGTSSDVGGYNYVSWYQQHPGKAPKLMIYEVSKRPSGVPDRYSGSKSGNTASLTVSGLQAEDEADYYCSSYAGSSNHVIFGGGTKLTVL

SEQ ID NO: 94 - protein, 7 aa, Homo sapiens
EVSKRPS

SEQ ID NO: 95 - protein, 11 aa, Homo sapiens
SSYAGSSNHVI

SEQ ID NO: 96 - protein, 22 aa, Homo sapiens
QSALTQPPSASGSPGQSVTISC

SEQ ID NO: 97 - protein, 32 aa, Homo sapiens
GVPDRYSGSKSGNTASLTVSGLQAEDEADYYC

SEQ ID NO: 98 - protein, 184 aa, Homo sapiens
EVQLVESGGGLVQPGRSLRLSCAASGFTFGDYAMYWVRQPPGKGLEWVSGISWNRGTIGYADSVKGRFTISRDNAKNSLYLQMNSLTPEDTALYYCAKDMLPASRFFYYMDVWGKGTTVIVSSASTKGPSVFPLAPSSKSTSGGTAALGCLVKDYFPEPVTVSWNSGALTSGVHTFPAVLQSSG

SEQ ID NO: 99 - protein, 123 aa, Homo sapiens
EVQLVESGGGLVQPGRSLRLSCAASGFTFGDYAMYWVRQPPGKGLEWVSGISWNRGTIGYADSVKGRFTISRDNAKNSLYLQMNSLTPEDTALYYCAKDMLPASRFFYYMDVWGKGTTVIVSS

SEQ ID NO: 100 - protein, 5 aa, Homo sapiens
DYAMY

SEQ ID NO: 101 - protein, 17 aa, Homo sapiens
GISWNRGTIGYADSVKG

SEQ ID NO: 102 - protein, 14 aa, Homo sapiens
DMLPASRFFYYMDV

SEQ ID NO: 103 - protein, 30 aa, Homo sapiens
EVQLVESGGGLVQPGRSLRLSCAASGFTFG

SEQ ID NO: 104 - protein, 14 aa, Homo sapiens
WVRQPPGKGLEWVS

SEQ ID NO: 105 - protein, 32 aa, Homo sapiens
RFTISRDNAKNSLYLQMNSLTPEDTALYYCAK

SEQ ID NO: 106 - protein, 11 aa, Homo sapiens
WGKGTTVIVSS

SEQ ID NO: 107 - protein, 181 aa, Homo sapiens
QSALTQPASVSGSPGQSITISCTGTSSDVGGYNYVSWYQQHPGKAPKLMIYDVSNRPSGVSNRFSGSKSGNTASLTISGLQAEDEADYYCSSYTSSSTLGVFGTGTKVTVLGQPKANPTVTLFPPSSEELQANKATLVCLISDFYPGAVTVAWKADGSPVKAGVETTKPSKQSNNKYAASS

SEQ ID NO: 108 - protein, 111 aa, Homo sapiens
QSALTQPASVSGSPGQSITISCTGTSSDVGGYNYVSWYQQHPGKAPKLMIYDVSNRPSGVSNRFSGSKSGNTASLTISGLQAEDEADYYCSSYTSSSTLGVFGTGTKVTVL

SEQ ID NO: 109 - protein, 182 aa, Homo sapiens
QVQLQESGPGLVKPSETLSLTCTVSGGSITSYYWSWIRQPPGKGLEWIEYIHYSGSTNYNPSLKSRVTISVDTSKNQFSLKLSSVTAADTAVYYCARLLKYSRGGCYFDHWGQGTLVTVSSASTKGPSVFPLAPSSKSTSGGTAALGCLVKDYFPEPVTVSWNSGALTSGVHTFPAVLQSSG

SEQ ID NO: 110 - protein, 121 aa, Homo sapiens
QVQLQESGPGLVKPSETLSLTCTVSGGSITSYYWSWIRQPPGKGLEWIEYIHYSGSTNYNPSLKSRVTISVDTSKNQFSLKLSSVTAADTAVYYCARLLKYSRGGCYFDHWGQGTLVTVSS

SEQ ID NO: 111 - protein, 16 aa, Homo sapiens
YIHYSGSTNYNPSLKS

SEQ ID NO: 112 - protein, 13 aa, Homo sapiens
LLKYSRGGCYFDH

SEQ ID NO: 113 - protein, 30 aa, Homo sapiens
QVQLQESGPGLVKPSETLSLTCTVSGGSIT

SEQ ID NO: 114 - protein, 14 aa, Homo sapiens
WIRQPPGKGLEWIE

SEQ ID NO: 115 - protein, 32 aa, Homo sapiens
RVTISVDTSKNQFSLKLSSVTAADTAVYYCAR

SEQ ID NO: 116 - protein, 192 aa, Homo sapiens
QSVLTQPPSASGTPGQRVTISCSGSSSNIGGNPVNWYQQLPGTAPKLLIYSNNQRPSGVPDRFSGSKSGTSASLAISGLQSEDEADYYCAAWDDSLKGPVFGGGTKLTVLGQPKAAPSVTLFPPSSEELQANKATLVCLISDFYPGAVTVAWKADSSPVKAGVETTTPSKQSNNKYAASSYLSLTPEQWKSH

SEQ ID NO: 117 - protein, 110 aa, Homo sapiens
QSVLTQPPSASGTPGQRVTISCSGSSSNIGGNPVNWYQQLPGTAPKLLIYSNNQRPSGVPDRFSGSKSGTSASLAISGLQSEDEADYYCAAWDDSLKGPVFGGGTKLTVL

SEQ ID NO: 118 - protein, 13 aa, Homo sapiens
SGSSSNIGGNPVN

SEQ ID NO: 119 - protein, 7 aa, Homo sapiens
SNNQRPS

SEQ ID NO: 120 - protein, 11 aa, Homo sapiens
AAWDDSLKGPV

SEQ ID NO: 121 - protein, 22 aa, Homo sapiens
QSVLTQPPSASGTPGQRVTISC

SEQ ID NO: 122 - protein, 15 aa, Homo sapiens
WYQQLPGTAPKLLIY

SEQ ID NO: 123 - protein, 32 aa, Homo sapiens
GVPDRFSGSKSGTSASLAISGLQSEDEADYYC

SEQ ID NO: 124 - protein, 177 aa, Homo sapiens
EVQLVESGGGLVQPGGSLRLSCAASGFTLSSYSMNWVRQAPGKGLEWVSYISSSSSTIYYADSVKGRFTISKDNAKNSLYLQMNSLRAEDTAVYYCAVGRGYFVYWGQGTLVTVSSASTKGPSVFPLAPSSKSTSGGTAALGCLVKDYFPEPVTVSWNSGALTSGVHTFPAVLQSSG

SEQ ID NO: 125 - protein, 116 aa, Homo sapiens
EVQLVESGGGLVQPGGSLRLSCAASGFTLSSYSMNWVRQAPGKGLEWVSYISSSSSTIYYADSVKGRFTISKDNAKNSLYLQMNSLRAEDTAVYYCAVGRGYFVYWGQGTLVTVSS

SEQ ID NO: 126 - protein, 5 aa, Homo sapiens
SYSMN

SEQ ID NO: 127 - protein, 17 aa, Homo sapiens
YISSSSSTIYYADSVKG

SEQ ID NO: 128 - protein, 7 aa, Homo sapiens
GRGYFVY

SEQ ID NO: 129 - protein, 30 aa, Homo sapiens
EVQLVESGGGLVQPGGSLRLSCAASGFTLS

SEQ ID NO: 130 - protein, 14 aa, Homo sapiens
WVRQAPGKGLEWVS

SEQ ID NO: 131 - protein, 32 aa, Homo sapiens
RFTISKDNAKNSLYLQMNSLRAEDTAVYYCAV

SEQ ID NO: 132 - protein, 187 aa, Homo sapiens
EIVLTQSPGTLSLSPGERATLSCRASQSVSSGYLAWYQQKPGQAPRLLIFGASSRATGIPDRFSGSGSGTDFTLTINRLEPEDFAVYYCQQYGSSRTFGQGTKVEIKRTVAAPSVFIFPPSDEQLKSGTASVVCLLNNFYPREAKVQWKVDNALQSGNSQESVTEQDSKDSTYSLSSTLTLSKADYE

SEQ ID NO: 133 - protein, 107 aa, Homo sapiens
EIVLTQSPGTLSLSPGERATLSCRASQSVSSGYLAWYQQKPGQAPRLLIFGASSRATGIPDRFSGSGSGTDFTLTINRLEPEDFAVYYCQQYGSSRTFGQGTKVEIK

SEQ ID NO: 134 - protein, 12 aa, Homo sapiens
RASQSVSSGYLA

SEQ ID NO: 135 - protein, 7 aa, Homo sapiens
GASSRAT

SEQ ID NO: 136 - protein, 8 aa, Homo sapiens
QQYGSSRT

SEQ ID NO: 137 - protein, 15 aa, Homo sapiens
WYQQKPGQAPRLLIF

SEQ ID NO: 138 - protein, 32 aa, Homo sapiens
GIPDRFSGSGSGTDFTLTINRLEPEDFAVYYC

SEQ ID NO: 139 - protein, 189 aa, Homo sapiens
QVQLVESGGGVVQPGRSLRLSCAASGFTFSSYGMHWVRQAPGKGLEWVAVIWYDGSNKYYADSVKGRFTISRDNSKNTLYLQMNSLRAEDTAVYYCARIEGYSYGDVRVYYYYGMDVWGQGTTVTVSSASTKGPSVFPLAPSSKSTSGGTAALGCLVKDYFPEPVTVSWNSGALTSGVHTFPAVLQSSG

SEQ ID NO: 140 - protein, 128 aa, Homo sapiens
QVQLVESGGGVVQPGRSLRLSCAASGFTFSSYGMHWVRQAPGKGLEWVAVIWYDGSNKYYADSVKGRFTISRDNSKNTLYLQMNSLRAEDTAVYYCARIEGYSYGDVRVYYYYGMDVWGQGTTVTVSS

SEQ ID NO: 141 - protein, 5 aa, Homo sapiens
SYGMH

SEQ ID NO: 142 - protein, 17 aa, Homo sapiens
VIWYDGSNKYYADSVKG

SEQ ID NO: 143 - protein, 19 aa, Homo sapiens
IEGYSYGDVRVYYYYGMDV

SEQ ID NO: 144 - protein, 30 aa, Homo sapiens
QVQLVESGGGVVQPGRSLRLSCAASGFTFS

SEQ ID NO: 145 - protein, 14 aa, Homo sapiens
WVRQAPGKGLEWVA

SEQ ID NO: 146 - protein, 32 aa, Homo sapiens
RFTISRDNSKNTLYLQMNSLRAEDTAVYYCAR

SEQ ID NO: 147 - protein, 11 aa, Homo sapiens
WGQGTTVTVSS

SEQ ID NO: 148 - protein, 180 aa, Homo sapiens
QSALTQPASVSGSPGQSITISCTGTTSDVGGYDYVSWYQQHPGKAPKLILSEVSNRPSGVSNRFSGSKSGNTASLTISGLQAEDEADYYCSSYPSSSTLVFGTGTKVTVLGQPKANPTVTLFPPSSEELQANKATLVCLISDFYPGAVTVAWKADGSPVKAGVETTTPSKQSNNKYAASS

SEQ ID NO: 149 - protein, 110 aa, Homo sapiens
QSALTQPASVSGSPGQSITISCTGTTSDVGGYDYVSWYQQHPGKAPKLILSEVSNRPSGVSNRFSGSKSGNTASLTISGLQAEDEADYYCSSYPSSSTLVFGTGTKVTVL

SEQ ID NO: 150 - protein, 14 aa, Homo sapiens
TGTTSDVGGYDYVS

SEQ ID NO: 151 - protein, 7 aa, Homo sapiens
EVSNRPS

SEQ ID NO: 152 - protein, 10 aa, Homo sapiens
SSYPSSSTLV

SEQ ID NO: 153 - protein, 15 aa, Homo sapiens
WYQQHPGKAPKLILS

SEQ ID NO: 154 - protein, 191 aa, Homo sapiens
QVHLVQSGAEVKKPGSSVKVSCKASGGTFSSCAISWVRQAPGQGLEWMGRIIPILGIANYAQKFQGRVTITADKSTSTAYMELSSLRSEDTAVYYCARGWEFGSGSYYRTDYYYYAMDVWGQGTTVTVSSASTKGPSVFPLAPCSRSTSGGTAALGCLVKDYFPEPVTVSWNSGALTSGVHTFPAVLQSSG

SEQ ID NO: 155 - protein, 130 aa, Homo sapiens
QVHLVQSGAEVKKPGSSVKVSCKASGGTFSSCAISWVRQAPGQGLEWMGRIIPILGIANYAQKFQGRVTITADKSTSTAYMELSSLRSEDTAVYYCARGWEFGSGSYYRTDYYYYAMDVWGQGTTVTVSS

SEQ ID NO: 156 - protein, 5 aa, Homo sapiens
SCAIS

SEQ ID NO: 157 - protein, 17 aa, Homo sapiens
RIIPILGIANYAQKFQG

SEQ ID NO: 158 - protein, 21 aa, Homo sapiens
GWEFGSGSYYRTDYYYYAMDV

SEQ ID NO: 159 - protein, 30 aa, Homo sapiens
QVHLVQSGAEVKKPGSSVKVSCKASGGTFS

SEQ ID NO: 160 - protein, 14 aa, Homo sapiens
WVRQAPGQGLEWMG

SEQ ID NO: 161 - protein, 32 aa, Homo sapiens
RVTITADKSTSTAYMELSSLRSEDTAVYYCAR

SEQ ID NO: 162 - protein, 180 aa, Homo sapiens
QSALTQPASVSGSPGQSITISCTGTSSDVGGYNYVSWYQQHPGKAPKLMIYEVTNRPSGVSNRFSGSRSGNTASLTISGLQAEDEADYYCSSYTSSSLYVFGTGTKVAVLGQPKANPTVTLFPPSSEELQANKATLVCLISDFYPGAVTVAWKADSSPVKAGVETTKPSKQSNNKYAASS

SEQ ID NO: 163 - protein, 110 aa, Homo sapiens
QSALTQPASVSGSPGQSITISCTGTSSDVGGYNYVSWYQQHPGKAPKLMIYEVTNRPSGVSNRFSGSRSGNTASLTISGLQAEDEADYYCSSYTSSSLYVFGTGTKVAVL

SEQ ID NO: 164 - protein, 7 aa, Homo sapiens
EVTNRPS

SEQ ID NO: 165 - protein, 10 aa, Homo sapiens
SSYTSSSLYV

SEQ ID NO: 166 - protein, 32 aa, Homo sapiens
GVSNRFSGSRSGNTASLTISGLQAEDEADYYC

SEQ ID NO: 167 - protein, 10 aa, Homo sapiens
FGTGTKVAVL

SEQ ID NO: 168 - protein, 187 aa, Homo sapiens
EVQLVQSGAEVKKPGESLRISCKGSGYSFSSYWISWVRQMPGKGLEWMGRIDPSDSNTNYSPSFQGHVTISADKSISTAYLQWSSLKASDTAMYYCARLSVRVWFGELPHYGMDVWGQGTTVTVSSASTKGPSVFPLAPSSKSTSGGTAALGCLVKDYFPEPVTVSWNSGALTSGVHTFPAVLQSSG

SEQ ID NO: 169 - protein, 126 aa, Homo sapiens
EVQLVQSGAEVKKPGESLRISCKGSGYSFSSYWISWVRQMPGKGLEWMGRIDPSDSNTNYSPSFQGHVTISADKSISTAYLQWSSLKASDTAMYYCARLSVRVWFGELPHYGMDVWGQGTTVTVSS

SEQ ID NO: 170 - protein, 5 aa, Homo sapiens
SYWIS

SEQ ID NO: 171 - protein, 17 aa, Homo sapiens
RIDPSDSNTNYSPSFQG

SEQ ID NO: 172 - protein, 17 aa, Homo sapiens
LSVRVWFGELPHYGMDV

SEQ ID NO: 173 - protein, 30 aa, Homo sapiens
EVQLVQSGAEVKKPGESLRISCKGSGYSFS

SEQ ID NO: 174 - protein, 14 aa, Homo sapiens
WVRQMPGKGLEWMG

SEQ ID NO: 175 - protein, 32 aa, Homo sapiens
HVTISADKSISTAYLQWSSLKASDTAMYYCAR

SEQ ID NO: 176 - protein, 152 aa, Homo sapiens
EIVLTQSPATLSLSPGERATLSCRASQSVSSYLAWYQQKPGQAPRLLIYDASNRASGIPARFSGSGSGTDFTLTISSLEPEDFAVYYCQQRRNWPLTFGGGTKVETKRTVAAPSVFIFPPSDEQLKSGTASVVCLLNNFYPREAKVQWKVDN

SEQ ID NO: 177 - protein, 107 aa, Homo sapiens
EIVLTQSPATLSLSPGERATLSCRASQSVSSYLAWYQQKPGQAPRLLIYDASNRASGIPARFSGSGSGTDFTLTISSLEPEDFAVYYCQQRRNWPLTFGGGTKVETK

SEQ ID NO: 178 - protein, 11 aa, Homo sapiens
RASQSVSSYLA

SEQ ID NO: 179 - protein, 7 aa, Homo sapiens
DASNRAS

SEQ ID NO: 180 - protein, 9 aa, Homo sapiens
QQRRNWPLT

SEQ ID NO: 181 - protein, 23 aa, Homo sapiens
EIVLTQSPATLSLSPGERATLSC

SEQ ID NO: 182 - protein, 15 aa, Homo sapiens
WYQQKPGQAPRLLIY

SEQ ID NO: 183 - protein, 32 aa, Homo sapiens
GIPARFSGSGSGTDFTLTISSLEPEDFAVYYC

SEQ ID NO: 184 - protein, 10 aa, Homo sapiens
FGGGTKVETK

SEQ ID NO: 185 - protein, 188 aa, Homo sapiens
QVQLVQSGAEVKKPGASVKVSCKASGYTFTGYYMHWVRQAPGQGLEWMGWINPNSGDTNYAQKFQGWVTMTRDTSLSTAYMELSRLKSDDTAVYYCARVGVGEYSGRHYYYYGMDVWGQGTTVTVSSASTKGPSVFPLAPSSKSTSGGTAALGCLVKDYFPEPVTVSWNSGALTSGVHTFPAVLQSSG

SEQ ID NO: 186 - protein, 127 aa, Homo sapiens
QVQLVQSGAEVKKPGASVKVSCKASGYTFTGYYMHWVRQAPGQGLEWMGWINPNSGDTNYAQKFQGWVTMTRDTSLSTAYMELSRLKSDDTAVYYCARVGVGEYSGRHYYYYGMDVWGQGTTVTVSS

SEQ ID NO: 187 - protein, 5 aa, Homo sapiens
GYYMH

SEQ ID NO: 188 - protein, 17 aa, Homo sapiens
WINPNSGDTNYAQKFQG

SEQ ID NO: 189 - protein, 18 aa, Homo sapiens
VGVGEYSGRHYYYYGMDV

SEQ ID NO: 190 - protein, 30 aa, Homo sapiens
QVQLVQSGAEVKKPGASVKVSCKASGYTFT

SEQ ID NO: 191 - protein, 32 aa, Homo sapiens
WVTMTRDTSLSTAYMELSRLKSDDTAVYYCAR

SEQ ID NO: 192 - protein, 152 aa, Homo sapiens
EIVLTQSPGTLSLSPGERATLSCRASQSISSSYLAWYQQKPGQAPRLLIYGASSRATGIPDRFSGSGSGTDFTLTISRLEPEDFAVYYCQQYGSSLTFGGGTKVEIKRTVAAPSVFIFPPSDEQLKSGTASVVCLLNNFYPREAKVQWKVDN

SEQ ID NO: 193 - protein, 107 aa, Homo sapiens
EIVLTQSPGTLSLSPGERATLSCRASQSISSSYLAWYQQKPGQAPRLLIYGASSRATGIPDRFSGSGSGTDFTLTISRLEPEDFAVYYCQQYGSSLTFGGGTKVEIK

SEQ ID NO: 194 - protein, 12 aa, Homo sapiens
RASQSISSSYLA

SEQ ID NO: 195 - protein, 8 aa, Homo sapiens
QQYGSSLT

SEQ ID NO: 196 - protein, 32 aa, Homo sapiens
GIPDRFSGSGSGTDFTLTISRLEPEDFAVYYC

SEQ ID NO: 197 - protein, 153 aa, Homo sapiens
EVQLVESGGGLVQPGRSLRLSCTASGFTFGDYAMSWFRQAPGKGLEWVGFIRSKAYGGTTQHAASVKGRFTISRDDSKSIAYLQMNSLKTEDTAVYHCARDGYDCSGGRCYSHIFDYWGQGTLVTVSSGESSPPPLVHLGRLSLPGSQGQSLV

SEQ ID NO: 198 - protein, 128 aa, Homo sapiens
EVQLVESGGGLVQPGRSLRLSCTASGFTFGDYAMSWFRQAPGKGLEWVGFIRSKAYGGTTQHAASVKGRFTISRDDSKSIAYLQMNSLKTEDTAVYHCARDGYDCSGGRCYSHIFDYWGQGTLVTVSS

SEQ ID NO: 199 - protein, 5 aa, Homo sapiens
DYAMS

SEQ ID NO: 200 - protein, 19 aa, Homo sapiens
FIRSKAYGGTTQHAASVKG

SEQ ID NO: 201 - protein, 17 aa, Homo sapiens
DGYDCSGGRCYSHIFDY

SEQ ID NO: 202 - protein, 30 aa, Homo sapiens
EVQLVESGGGLVQPGRSLRLSCTASGFTFG

SEQ ID NO: 203 - protein, 14 aa, Homo sapiens
WFRQAPGKGLEWVG

SEQ ID NO: 204 - protein, 32 aa, Homo sapiens
RFTISRDDSKSIAYLQMNSLKTEDTAVYHCAR

SEQ ID NO: 205 - protein, 151 aa, Homo sapiens
EIVMTQSPATLSVSPGERATLSCRASQSVSSNLAWYQQKPGQAPRLLIYGASTRATGIPARFSGSGSGTEFTLTISSLQSEDFAVYYCQQYDNWWTFGQGTKVEIKRTVAAPSVFIFPPSDEQLKSGTASVVCLLNNFYPREAKVQWKVDN

SEQ ID NO: 206 - protein, 106 aa, Homo sapiens
EIVMTQSPATLSVSPGERATLSCRASQSVSSNLAWYQQKPGQAPRLLIYGASTRATGIPARFSGSGSGTEFTLTISSLQSEDFAVYYCQQYDNWWTFGQGTKVEIK

SEQ ID NO: 207 - protein, 11 aa, Homo sapiens
RASQSVSSNLA

SEQ ID NO: 208 - protein, 7 aa, Homo sapiens
GASTRAT

SEQ ID NO: 209 - protein, 8 aa, Homo sapiens
QQYDNWWT

SEQ ID NO: 210 - protein, 23 aa, Homo sapiens
EIVMTQSPATLSVSPGERATLSC

SEQ ID NO: 211 - protein, 32 aa, Homo sapiens
GIPARFSGSGSGTEFTLTISSLQSEDFAVYYC

SEQ ID NO: 212 - protein, 186 aa, Homo sapiens
QVQLQESGPGLVKPSGTLSLTCAVSGGSISSINWWSWVRQPPGKGLEWIGEIYHSGNTNYNPSLKSRVTISGDKSKNQFSLKLSSVTAADTAVYYCARGYYDSSPYYEPQGIDYWGQGILVTVSSASTKGPSVFPLAPSSKSTSGGTAALGCLVKDYFPEPVTVSWNSGALTSGVHTFPAVLQSSG

SEQ ID NO: 213 - protein, 125 aa, Homo sapiens
QVQLQESGPGLVKPSGTLSLTCAVSGGSISSINWWSWVRQPPGKGLEWIGEIYHSGNTNYNPSLKSRVTISGDKSKNQFSLKLSSVTAADTAVYYCARGYYDSSPYYEPQGIDYWGQGILVTVSS

SEQ ID NO: 214 - protein, 6 aa, Homo sapiens
SINWWS

SEQ ID NO: 215 - protein, 16 aa, Homo sapiens
EIYHSGNTNYNPSLKS

SEQ ID NO: 216 - protein, 16 aa, Homo sapiens
GYYDSSPYYEPQGIDY

SEQ ID NO: 217 - protein, 30 aa, Homo sapiens
QVQLQESGPGLVKPSGTLSLTCAVSGGSIS

SEQ ID NO: 218 - protein, 14 aa, Homo sapiens
WVRQPPGKGLEWIG

SEQ ID NO: 219 - protein, 32 aa, Homo sapiens
RVTISGDKSKNQFSLKLSSVTAADTAVYYCAR

SEQ ID NO: 220 - protein, 11 aa, Homo sapiens
WGQGILVTVSS

SEQ ID NO: 221 - protein, 181 aa, Homo sapiens
QLVLTQSPSASASLGASVKLTCTLSSGHSSYTIAWHQQQPEKGPRYLMKVNSDGSHTKGDGIPDRFSGSSSGAERYLTISSLQSEDEADYYCQTWGTGIRVFGGGTKLTVLGQPKAAPSVTLFPPSSEELQANKATLVCLISDFYPGAVTVAWKADSSPVKAGVETTTPSKQSNNKYAASS

SEQ ID NO: 222 - protein, 111 aa, Homo sapiens
QLVLTQSPSASASLGASVKLTCTLSSGHSSYTIAWHQQQPEKGPRYLMKVNSDGSHTKGDGIPDRFSGSSSGAERYLTISSLQSEDEADYYCQTWGTGIRVFGGGTKLTVL

SEQ ID NO: 223 - protein, 12 aa, Homo sapiens
TLSSGHSSYTIA

SEQ ID NO: 224 - protein, 11 aa, Homo sapiens
VNSDGSHTKGD

SEQ ID NO: 225 - protein, 9 aa, Homo sapiens
QTWGTGIRV

SEQ ID NO: 226 - protein, 22 aa, Homo sapiens
QLVLTQSPSASASLGASVKLTC

SEQ ID NO: 227 - protein, 15 aa, Homo sapiens
WHQQQPEKGPRYLMK

SEQ ID NO: 228 - protein, 32 aa, Homo sapiens
GIPDRFSGSSSGAERYLTISSLQSEDEADYYC

SEQ ID NO: 229 - protein, 143 aa, Homo sapiens
QVQLVQSGAEVKKPGASVKVSCKASGYTFTSYFIHWVRQAPGQGLEWMGIINPSGGSTSYAQKFQGRVTMTRDTSTSTVYMELSSLRSEDTAVYYCARHTTPTRYFDYWGQGTLVTVSSGSASAPTLFPLVSCENSPSDTSSV

SEQ ID NO: 230 - protein, 119 aa, Homo sapiens
QVQLVQSGAEVKKPGASVKVSCKASGYTFTSYFIHWVRQAPGQGLEWMGIINPSGGSTSYAQKFQGRVTMTRDTSTSTVYMELSSLRSEDTAVYYCARHTTPTRYFDYWGQGTLVTVSS

SEQ ID NO: 231 - protein, 5 aa, Homo sapiens
SYFIH

SEQ ID NO: 232 - protein, 17 aa, Homo sapiens
IINPSGGSTSYAQKFQG

SEQ ID NO: 233 - protein, 10 aa, Homo sapiens
HTTPTRYFDY

SEQ ID NO: 234 - protein, 32 aa, Homo sapiens
RVTMTRDTSTSTVYMELSSLRSEDTAVYYCAR

SEQ ID NO: 235 - protein, 153 aa, Homo sapiens
EIVLTQSPGTLSLSPGERATLSCRASQSVTSSYLAWYQQRRGQAPRLLIYGASSRATGIPDRFSGSGSGTDFTLTISRLEPEDFAVYYCQQYGSSPLTFGGGTKVEIKRTVAAPSVFIFPPSDEQLKSGTASVVCLLNNFYPREAKVQWKVDN

SEQ ID NO: 236 - protein, 108 aa, Homo sapiens
EIVLTQSPGTLSLSPGERATLSCRASQSVTSSYLAWYQQRRGQAPRLLIYGASSRATGIPDRFSGSGSGTDFTLTISRLEPEDFAVYYCQQYGSSPLTFGGGTKVEIK

SEQ ID NO: 237 - protein, 12 aa, Homo sapiens
RASQSVTSSYLA

SEQ ID NO: 238 - protein, 9 aa, Homo sapiens
QQYGSSPLT

SEQ ID NO: 239 - protein, 15 aa, Homo sapiens
WYQQRRGQAPRLLIY

SEQ ID NO: 240 - protein, 129 aa, Homo sapiens
QLQLQESGPGLVKPSETLSLTCTVSGGSISSSSYYWGWIRQPPGKGLEWIGSIYYSGSTYYNPSLKSRVTISVDTSKNQFSLKLSSVTAADTAVYYCARKPRSDYGYFDLWGRGTLVTVSSASTKGPSV

SEQ ID NO: 241 - protein, 121 aa, Homo sapiens
QLQLQESGPGLVKPSETLSLTCTVSGGSISSSSYYWGWIRQPPGKGLEWIGSIYYSGSTYYNPSLKSRVTISVDTSKNQFSLKLSSVTAADTAVYYCARKPRSDYGYFDLWGRGTLVTVSS

SEQ ID NO: 242 - protein, 7 aa, Homo sapiens
SSSYYWG

SEQ ID NO: 243 - protein, 16 aa, Homo sapiens
SIYYSGSTYYNPSLKS

SEQ ID NO: 244 - protein, 11 aa, Homo sapiens
KPRSDYGYFDL

SEQ ID NO: 245 - protein, 30 aa, Homo sapiens
QLQLQESGPGLVKPSETLSLTCTVSGGSIS

SEQ ID NO: 246 - protein, 153 aa, Homo sapiens
DIQMTQSPSSLSASVGDRVTITCRASQSISSYLNWYQQKPGKAPKLLIYAASSLQSGVPSRFSGSGSGTDFTLTISSLQPEDFATYYCQQSYSTPQLTFGGGTKVEIKRTVAAPSVFIFPPSDEQLKSGTASVVCLLNNFYPREAKVQWKVDN

SEQ ID NO: 247 - protein, 108 aa, Homo sapiens
DIQMTQSPSSLSASVGDRVTITCRASQSISSYLNWYQQKPGKAPKLLIYAASSLQSGVPSRFSGSGSGTDFTLTISSLQPEDFATYYCQQSYSTPQLTFGGGTKVEIK

SEQ ID NO: 248 - protein, 11 aa, Homo sapiens
RASQSISSYLN

SEQ ID NO: 249 - protein, 7 aa, Homo sapiens
AASSLQS

SEQ ID NO: 250 - protein, 10 aa, Homo sapiens
QQSYSTPQLT

SEQ ID NO: 251 - protein, 23 aa, Homo sapiens
DIQMTQSPSSLSASVGDRVTITC

SEQ ID NO: 252 - protein, 15 aa, Homo sapiens
WYQQKPGKAPKLLIY

SEQ ID NO: 253 - protein, 32 aa, Homo sapiens
GVPSRFSGSGSGTDFTLTISSLQPEDFATYYC

SEQ ID NO: 254 - protein, 191 aa, Homo sapiens
EVQLVESGGGLVKPGRSLRLSCTASGFTFGDYAMSWFRQAPGKGLEWVGFTRRKAYGGTTEYAASVKGRFTISRDDSKSIAYLQMNSLKTEDTAVYYCTRIKVGRFDLTDSGSYRYFDYWGQGTLVTVSSASTKGPSVFPLAPSSKSTSGGTAALGCLVKDYFPEPVTVSWNSGALTSGVHTFPAVLQSSG

SEQ ID NO: 255 - protein, 130 aa, Homo sapiens
EVQLVESGGGLVKPGRSLRLSCTASGFTFGDYAMSWFRQAPGKGLEWVGFTRRKAYGGTTEYAASVKGRFTISRDDSKSIAYLQMNSLKTEDTAVYYCTRIKVGRFDLTDSGSYRYFDYWGQGTLVTVSS

SEQ ID NO: 256 - protein, 19 aa, Homo sapiens
FTRRKAYGGTTEYAASVKG

SEQ ID NO: 257 - protein, 19 aa, Homo sapiens
IKVGRFDLTDSGSYRYFDY

SEQ ID NO: 258 - protein, 30 aa, Homo sapiens
EVQLVESGGGLVKPGRSLRLSCTASGFTFG

SEQ ID NO: 259 - protein, 32 aa, Homo sapiens
RFTISRDDSKSIAYLQMNSLKTEDTAVYYCTR

SEQ ID NO: 260 - protein, 157 aa, Homo sapiens
DIVMTQSPLSLPVTPGEPASISCRSSQSLLHSNGYNYLDWYLQKPGQSPQLLIYLGSNRASGVPDRFSGSGSGTDFTLKISRVEAEDVGVYYCMQPLQTPWTFGQGTKVEIKRTVAAPSVFIFPPSDEQLKSGTASVVCLLNNFYPREAKVQWKVDN

SEQ ID NO: 261 - protein, 112 aa, Homo sapiens
DIVMTQSPLSLPVTPGEPASISCRSSQSLLHSNGYNYLDWYLQKPGQSPQLLIYLGSNRASGVPDRFSGSGSGTDFTLKISRVEAEDVGVYYCMQPLQTPWTFGQGTKVEIK

SEQ ID NO: 262 - protein, 16 aa, Homo sapiens
RSSQSLLHSNGYNYLD

SEQ ID NO: 263 - protein, 7 aa, Homo sapiens
LGSNRAS

SEQ ID NO: 264 - protein, 9 aa, Homo sapiens
MQPLQTPWT

SEQ ID NO: 265 - protein, 23 aa, Homo sapiens
DIVMTQSPLSLPVTPGEPASISC

SEQ ID NO: 266 - protein, 15 aa, Homo sapiens
WYLQKPGQSPQLLIY

SEQ ID NO: 267 - protein, 32 aa, Homo sapiens
GVPDRFSGSGSGTDFTLKISRVEAEDVGVYYC

SEQ ID NO: 268 - protein, 152 aa, Homo sapiens
EVQLVESGGGLVQPGGSLRLSCAASGFTLSSYWMSWVRQAPGKGLEWVANIKQDGSEKYYVDSVKGRFTISRDNAKNSLYLQMNSLRAEDTAVYYCARDLTATWFDPWGQGTLVTVSSAPTKAPDVFPIISGCRHPKDNSPVVLACLITGYH

SEQ ID NO: 269 - protein, 118 aa, Homo sapiens
EVQLVESGGGLVQPGGSLRLSCAASGFTLSSYWMSWVRQAPGKGLEWVANIKQDGSEKYYVDSVKGRFTISRDNAKNSLYLQMNSLRAEDTAVYYCARDLTATWFDPWGQGTLVTVSS

SEQ ID NO: 270 - protein, 5 aa, Homo sapiens
SYWMS

SEQ ID NO: 271 - protein, 17 aa, Homo sapiens
NIKQDGSEKYYVDSVKG

SEQ ID NO: 272 - protein, 9 aa, Homo sapiens
DLTATWFDP

SEQ ID NO: 273 - protein, 32 aa, Homo sapiens
RFTISRDNAKNSLYLQMNSLRAEDTAVYYCAR

SEQ ID NO: 274 - protein, 180 aa, Homo sapiens
QTVVTQEPSFSVSPGGTVTLTCGLSSGSVSTSYYPSWYQQTPGQAPRTLIYSTNKRSSGVPDRFSGSILGNKAALTITGAQADDESDYYCVLYMGSGMSVFGGGTKLTVLGQPKAAPSVTLFPPSSEELQANKATLVCLISDFYPGAVTVAWKADSSPVKAGVETTTPSKQSNNKYAASS

SEQ ID NO: 275 - protein, 110 aa, Homo sapiens
QTVVTQEPSFSVSPGGTVTLTCGLSSGSVSTSYYPSWYQQTPGQAPRTLIYSTNKRSSGVPDRFSGSILGNKAALTITGAQADDESDYYCVLYMGSGMSVFGGGTKLTVL

SEQ ID NO: 276 - protein, 14 aa, Homo sapiens
GLSSGSVSTSYYPS

SEQ ID NO: 277 - protein, 7 aa, Homo sapiens
STNKRSS

SEQ ID NO: 278 - protein, 10 aa, Homo sapiens
VLYMGSGMSV

SEQ ID NO: 279 - protein, 22 aa, Homo sapiens
QTVVTQEPSFSVSPGGTVTLTC

SEQ ID NO: 280 - protein, 15 aa, Homo sapiens
WYQQTPGQAPRTLIY

SEQ ID NO: 281 - protein, 32 aa, Homo sapiens
GVPDRFSGSILGNKAALTITGAQADDESDYYC

SEQ ID NO: 282 - protein, 186 aa, Homo sapiens
QVQLVQSGAEVKKPGASVKVSCKASGYTFTSYALHWVRQAPGQRLEWMGWINAGNGNTKYSQRFQGRVTIIRDTSASTTYMELSSLRSEDTAVYYCARGYARAGVITIKESLHHWGQGTLVTVSSASTKGPSVFPLAPSSKSTSGGTAALGCLVKDYFPEPVTVSWNSGALTSGVHTFPAVLQSSG

SEQ ID NO: 283 - protein, 125 aa, Homo sapiens
QVQLVQSGAEVKKPGASVKVSCKASGYTFTSYALHWVRQAPGQRLEWMGWINAGNGNTKYSQRFQGRVTIIRDTSASTTYMELSSLRSEDTAVYYCARGYARAGVITIKESLHHWGQGTLVTVSS

SEQ ID NO: 284 - protein, 5 aa, Homo sapiens
SYALH

SEQ ID NO: 285 - protein, 17 aa, Homo sapiens
WINAGNGNTKYSQRFQG

SEQ ID NO: 286 - protein, 16 aa, Homo sapiens
GYARAGVITIKESLHH

SEQ ID NO: 287 - protein, 14 aa, Homo sapiens
WVRQAPGQRLEWMG

SEQ ID NO: 288 - protein, 32 aa, Homo sapiens
RVTIIRDTSASTTYMELSSLRSEDTAVYYCAR

SEQ ID NO: 289 - protein, 159 aa, Homo sapiens
DIVMTQSPDSLAVSLGERATINCKSSQSVLYSSNNKNYLAWYQQKPGQPPKLLIYWASTRESGVPDRFSGSGSGTDFTLTISSLQAEDVAVYYCQQYYSTPPLTFGGGTKVEIKRTVAAPSVFIFPPSDEQLKSGTASVVCLLNNFYPREAKVQWKVDN

SEQ ID NO: 290 - protein, 114 aa, Homo sapiens
DIVMTQSPDSLAVSLGERATINCKSSQSVLYSSNNKNYLAWYQQKPGQPPKLLIYWASTRESGVPDRFSGSGSGTDFTLTISSLQAEDVAVYYCQQYYSTPPLTFGGGTKVEIK

SEQ ID NO: 291 - protein, 17 aa, Homo sapiens
KSSQSVLYSSNNKNYLA

SEQ ID NO: 292 - protein, 10 aa, Homo sapiens
QQYYSTPPLT

SEQ ID NO: 293 - protein, 32 aa, Homo sapiens
GVPDRFSGSGSGTDFTLTISSLQAEDVAVYYC

SEQ ID NO: 294 - protein, 183 aa, Homo sapiens
QVQLQESGPGLVKPSETLSLTCTVSGGSISSSYWSWIRQPPGKGLEWIGYIYYSGNTNYNPSLKSRVTLSIDTSKNQFSLKLSSVTAADTAVYYCACSVTIFGVVTPAFDIWGQGTMVTVSSASTKGPSVFPLAPSSKSTSGGTAALGCLVKDYFPEPVTVSWNSGALTSGVHTFPAVLQSSG

SEQ ID NO: 295 - protein, 122 aa, Homo sapiens
QVQLQESGPGLVKPSETLSLTCTVSGGSISSSYWSWIRQPPGKGLEWIGYIYYSGNTNYNPSLKSRVTLSIDTSKNQFSLKLSSVTAADTAVYYCACSVTIFGVVTPAFDIWGQGTMVTVSS

SEQ ID NO: 296 - protein, 5 aa, Homo sapiens
SSYWS

SEQ ID NO: 297 - protein, 16 aa, Homo sapiens
YIYYSGNTNYNPSLKS

SEQ ID NO: 298 - protein, 14 aa, Homo sapiens
SVTIFGVVTPAFDI

SEQ ID NO: 299 - protein, 32 aa, Homo sapiens
RVTLSIDTSKNQFSLKLSSVTAADTAVYYCAC

SEQ ID NO: 300 - protein, 187 aa, Homo sapiens
EIVLTHSPGTLSLSPGERATLSCRASQSVRSYLAWYQQKPGQAPRLLIYGASSRATGIPDRFSGSGSGTDFTLTISRLEPDDFAVYYCQQYGSSPWTFGQGTKVEIKRTVAAPSVFIFPPSDEQLKSGTASVVCLLNNFYPREAKVQWKVDNALQSGNSQESVTEQDSKDSTYSLSSTLTLSKADYE

SEQ ID NO: 301 - protein, 107 aa, Homo sapiens
EIVLTHSPGTLSLSPGERATLSCRASQSVRSYLAWYQQKPGQAPRLLIYGASSRATGIPDRFSGSGSGTDFTLTISRLEPDDFAVYYCQQYGSSPWTFGQGTKVEIK

SEQ ID NO: 302 - protein, 11 aa, Homo sapiens
RASQSVRSYLA

SEQ ID NO: 303 - protein, 9 aa, Homo sapiens
QQYGSSPWT

SEQ ID NO: 304 - protein, 23 aa, Homo sapiens
EIVLTHSPGTLSLSPGERATLSC

SEQ ID NO: 305 - protein, 32 aa, Homo sapiens
GIPDRFSGSGSGTDFTLTISRLEPDDFAVYYC

SEQ ID NO: 306 - protein, 198 aa, Homo sapiens
QVQLVQSGAEVKKPGSSVKVSCKASGGTFSSYAISWVRQAPGQGLEWMGRIIPILGIANYAQKFQGRVTITADKSTSTAYMELSSLRSEDTAVYYCARWDFGVVIQYGMDVWGQGTTVTVSSASTKGPSVFPLAPSSKSTSGGTAALGCLVKDYFPEPVTVSWNSGALTSGVHTFPAVLQSSGLYSLSSVVTVPSSSL

SEQ ID NO: 307 - protein, 122 aa, Homo sapiens
QVQLVQSGAEVKKPGSSVKVSCKASGGTFSSYAISWVRQAPGQGLEWMGRIIPILGIANYAQKFQGRVTITADKSTSTAYMELSSLRSEDTAVYYCARWDFGVVIQYGMDVWGQGTTVTVSS

SEQ ID NO: 308 - protein, 5 aa, Homo sapiens
SYAIS

SEQ ID NO: 309 - protein, 13 aa, Homo sapiens
WDFGVVIQYGMDV

SEQ ID NO: 310 - protein, 30 aa, Homo sapiens
QVQLVQSGAEVKKPGSSVKVSCKASGGTFS

SEQ ID NO: 311 - protein, 178 aa, Homo sapiens
QAVVTQEPSLTVSPGGTVTLTCGSSTGAVTSGHYPYWFQQKPGQAPRTLIYDTSNKHSWTPARFSGSLLGGKAALTLSGAQPEDEAEYYCLLSYSGWVFGGGTKLTVLGQPKAAPSVTLFPPSSEELQANKATLVCLISDFYPGAVTVAWKADSSPVKAGVETTTPSKQSNNKYAASS

SEQ ID NO: 312 - protein, 108 aa, Homo sapiens
QAVVTQEPSLTVSPGGTVTLTCGSSTGAVTSGHYPYWFQQKPGQAPRTLIYDTSNKHSWTPARFSGSLLGGKAALTLSGAQPEDEAEYYCLLSYSGWVFGGGTKLTVL

SEQ ID NO: 313 - protein, 14 aa, Homo sapiens
GSSTGAVTSGHYPY

SEQ ID NO: 314 - protein, 7 aa, Homo sapiens
DTSNKHS

SEQ ID NO: 315 - protein, 8 aa, Homo sapiens
LLSYSGWV

SEQ ID NO: 316 - protein, 22 aa, Homo sapiens
QAVVTQEPSLTVSPGGTVTLTC

SEQ ID NO: 317 - protein, 15 aa, Homo sapiens
WFQQKPGQAPRTLIY

SEQ ID NO: 318 - protein, 32 aa, Homo sapiens
WTPARFSGSLLGGKAALTLSGAQPEDEAEYYC

SEQ ID NO: 319 - protein, 183 aa, Homo sapiens
QVQLQESGPGLVKPSETLSLTCTVSGGSINSFYWNWIRQPPGKGLEWIGYIYYSGNTKYNPSLKSRVTISVDTSNSQFSLKLSSVTAADTAVYYCAALKKQELVSLQAFDIWGQGTMVTVSSASTKGPSVFPLAPSSKSTSGGTAALGCLVKDYFPEPVTVSWNSGALTSGVHTFPAVLQSSG

SEQ ID NO: 320 - protein, 122 aa, Homo sapiens
QVQLQESGPGLVKPSETLSLTCTVSGGSINSFYWNWIRQPPGKGLEWIGYIYYSGNTKYNPSLKSRVTISVDTSNSQFSLKLSSVTAADTAVYYCAALKKQELVSLQAFDIWGQGTMVTVSS

SEQ ID NO: 321 - protein, 5 aa, Homo sapiens
SFYWN

SEQ ID NO: 322 - protein, 16 aa, Homo sapiens
YIYYSGNTKYNPSLKS

SEQ ID NO: 323 - protein, 14 aa, Homo sapiens
LKKQELVSLQAFDI

SEQ ID NO: 324 - protein, 30 aa, Homo sapiens
QVQLQESGPGLVKPSETLSLTCTVSGGSIN

SEQ ID NO: 325 - protein, 32 aa, Homo sapiens
RVTISVDTSNSQFSLKLSSVTAADTAVYYCAA

SEQ ID NO: 326 - protein, 157 aa, Homo sapiens
DIQMTQSPSSLSASLGDGVTITCRASQSISSYLSWYQQKPGKAPKLLIYAASSLQSGVPSRFSGSGSGTDFTLTISSLQPEDFATYYCQQSYNTPVTFGQGTKVEIKRTVAAPSVFIFPPSDEQLKSGTASVVCLLNNFYPREAKVQWKVDNADRKS

SEQ ID NO: 327 - protein, 107 aa, Homo sapiens
DIQMTQSPSSLSASLGDGVTITCRASQSISSYLSWYQQKPGKAPKLLIYAASSLQSGVPSRFSGSGSGTDFTLTISSLQPEDFATYYCQQSYNTPVTFGQGTKVEIK

SEQ ID NO: 328 - protein, 11 aa, Homo sapiens
RASQSISSYLS

SEQ ID NO: 329 - protein, 9 aa, Homo sapiens
QQSYNTPVT

SEQ ID NO: 330 - protein, 23 aa, Homo sapiens
DIQMTQSPSSLSASLGDGVTITC

SEQ ID NO: 331 - protein, 183 aa, Homo sapiens
QVQLQESGPGLVKPSETLSLTCTVSGGSISSYYWSWIRQPPGKGLEWIGYIYYSGSTKYNPSLKSRVTISVDTSKNQFSLKLTSVTAADTAVYYCARIYDSSGYYHPVFDYWGQGTLVTVSSASTKGPSVFPLAPSSKSTSGGTAALGCLVKDYFPEPVTVSWNSGALTSGVHTFPAVLQSSG

SEQ ID NO: 332 - protein, 122 aa, Homo sapiens
QVQLQESGPGLVKPSETLSLTCTVSGGSISSYYWSWIRQPPGKGLEWIGYIYYSGSTKYNPSLKSRVTISVDTSKNQFSLKLTSVTAADTAVYYCARIYDSSGYYHPVFDYWGQGTLVTVSS

SEQ ID NO: 333 - protein, 16 aa, Homo sapiens
YIYYSGSTKYNPSLKS

SEQ ID NO: 334 - protein, 14 aa, Homo sapiens
IYDSSGYYHPVFDY

SEQ ID NO: 335 - protein, 32 aa, Homo sapiens
RVTISVDTSKNQFSLKLTSVTAADTAVYYCAR

SEQ ID NO: 336 - protein, 153 aa, Homo sapiens
EIVLTQSPGTLSLSPGERATLSCRASQSVSSSYLAWYQQKPGQAPRLLIYGASSRATDIPDRFSGSGSGTDFTLTISRLEPEDFAVYYCQQYGSSPWTFGQGTKVEIKRTVAAPSVFIFPPSDEQLKSGTASVVCLLNNFYPREAKVQWKVDN

SEQ ID NO: 337 - protein, 108 aa, Homo sapiens
EIVLTQSPGTLSLSPGERATLSCRASQSVSSSYLAWYQQKPGQAPRLLIYGASSRATDIPDRFSGSGSGTDFTLTISRLEPEDFAVYYCQQYGSSPWTFGQGTKVEIK

SEQ ID NO: 338 - protein, 12 aa, Homo sapiens
RASQSVSSSYLA

SEQ ID NO: 339 - protein, 32 aa, Homo sapiens
DIPDRFSGSGSGTDFTLTISRLEPEDFAVYYC

SEQ ID NO: 340 - protein, 188 aa, Homo sapiens
QVQLVQSGAEVKKPGASVRVSCKASGYTFTSYYIYWVRQAPGQGLEWMGVINPSGGSTSYAQKFQGRVTLTRDTSTSTVYMDLSSLRSEDTAVYYCARDPIMWEVVTRGRGNWFDPWGQGTLVTVSSASTKGPSVFPLAPSSKSTSGGTAALGCLVKDYFPEPVTVSWNSGALTSGVHTFPAVLQSSG

SEQ ID NO: 341 - protein, 127 aa, Homo sapiens
QVQLVQSGAEVKKPGASVRVSCKASGYTFTSYYIYWVRQAPGQGLEWMGVINPSGGSTSYAQKFQGRVTLTRDTSTSTVYMDLSSLRSEDTAVYYCARDPIMWEVVTRGRGNWFDPWGQGTLVTVSS

SEQ ID NO: 342 - protein, 5 aa, Homo sapiens
SYYIY

SEQ ID NO: 343 - protein, 17 aa, Homo sapiens
VINPSGGSTSYAQKFQG

SEQ ID NO: 344 - protein, 18 aa, Homo sapiens
DPIMWEVVTRGRGNWFDP

SEQ ID NO: 345 - protein, 30 aa, Homo sapiens
QVQLVQSGAEVKKPGASVRVSCKASGYTFT

SEQ ID NO: 346 - protein, 32 aa, Homo sapiens
RVTLTRDTSTSTVYMDLSSLRSEDTAVYYCAR

SEQ ID NO: 347 - protein, 193 aa, Homo sapiens
QSVLTQPPSVSGAPGQRVTIPCTGSSFNIGAGYDVHWYQQLPGTAPKLLIFGNSNRPSGVPDRFSGSRSGTSASLAITGLQAEDEADYYCQSYDSSLSGVVFGGGTTLTVLGQPKAAPSVTLFPPSSEELQANKATLVCLISDFYPGAVTVAWKADSSPVKAGVETTTPSKQSNNKYAASSYLSLTPEQWKSH

SEQ ID NO: 348 - protein, 111 aa, Homo sapiens
QSVLTQPPSVSGAPGQRVTIPCTGSSFNIGAGYDVHWYQQLPGTAPKLLIFGNSNRPSGVPDRFSGSRSGTSASLAITGLQAEDEADYYCQSYDSSLSGVVFGGGTTLTVL

SEQ ID NO: 349 - protein, 14 aa, Homo sapiens
TGSSFNIGAGYDVH

SEQ ID NO: 350 - protein, 7 aa, Homo sapiens
GNSNRPS

SEQ ID NO: 351 - protein, 11 aa, Homo sapiens
QSYDSSLSGVV

SEQ ID NO: 352 - protein, 22 aa, Homo sapiens
QSVLTQPPSVSGAPGQRVTIPC

SEQ ID NO: 353 - protein, 15 aa, Homo sapiens
WYQQLPGTAPKLLIF

SEQ ID NO: 354 - protein, 32 aa, Homo sapiens
GVPDRFSGSRSGTSASLAITGLQAEDEADYYC

SEQ ID NO: 355 - protein, 10 aa, Homo sapiens
FGGGTTLTVL

SEQ ID NO: 356 - protein, 152 aa, Homo sapiens
EVQLVESGGGLVQPGGSLRLSCAASGFTVSSNYMSWVRQAPGKGLEWVSVIYSDGNTYYADSVKGRFTISRDNSKNMLYLQMNSLRAEDTAVYYCARDPGQGYCSGGSCAPSYSLDYWGQGTLVTVSSGSASAPTLFPLVSCENSPSDTSSV

SEQ ID NO: 357 - protein, 128 aa, Homo sapiens
EVQLVESGGGLVQPGGSLRLSCAASGFTVSSNYMSWVRQAPGKGLEWVSVIYSDGNTYYADSVKGRFTISRDNSKNMLYLQMNSLRAEDTAVYYCARDPGQGYCSGGSCAPSYSLDYWGQGTLVTVSS

SEQ ID NO: 358 - protein, 5 aa, Homo sapiens
SNYMS

SEQ ID NO: 359 - protein, 16 aa, Homo sapiens
VIYSDGNTYYADSVKG

SEQ ID NO: 360 - protein, 20 aa, Homo sapiens
DPGQGYCSGGSCAPSYSLDY

SEQ ID NO: 361 - protein, 30 aa, Homo sapiens
EVQLVESGGGLVQPGGSLRLSCAASGFTVS

SEQ ID NO: 362 - protein, 32 aa, Homo sapiens
RFTISRDNSKNMLYLQMNSLRAEDTAVYYCAR

SEQ ID NO: 363 - protein, 176 aa, Homo sapiens
SYELTQPPSVSVSPGQTASITCSGDKLGDRYVCWYQQKPGQSPVLVIYQDTKRPSGIPERFSGSNSGNTATLTISGTQAMDEADYYCQAWDSSTWVFGGGTKLTVLGQPKAAPSVTLFPPSSEELQANKATLVCLISDFYPGAVTVAWKADSSPVKAGVETTTPSKQSNNKYAASS

SEQ ID NO: 364 - protein, 106 aa, Homo sapiens
SYELTQPPSVSVSPGQTASITCSGDKLGDRYVCWYQQKPGQSPVLVIYQDTKRPSGIPERFSGSNSGNTATLTISGTQAMDEADYYCQAWDSSTWVFGGGTKLTVL

SEQ ID NO: 365 - protein, 11 aa, Homo sapiens
SGDKLGDRYVC

SEQ ID NO: 366 - protein, 7 aa, Homo sapiens
QDTKRPS

SEQ ID NO: 367 - protein, 9 aa, Homo sapiens
QAWDSSTWV

SEQ ID NO: 368 - protein, 22 aa, Homo sapiens
SYELTQPPSVSVSPGQTASITC

SEQ ID NO: 369 - protein, 15 aa, Homo sapiens
WYQQKPGQSPVLVIY

SEQ ID NO: 370 - protein, 32 aa, Homo sapiens
GIPERFSGSNSGNTATLTISGTQAMDEADYYC

SEQ ID NO: 371 - protein, 184 aa, Homo sapiens
EVQLVESGGGLVQPGGSLRLSCAASGFTVSSNYMSWVRQAPGKGLEWVSDIYSGGSTYYADSVKGRFTISRHNSKNTLYLQMNSLRAEDTAVYYCARDRRGYSYGLHHGMDVWGQGTTVTVSSASTKGPSVFPLAPSSKSTSGGTAALGCLVKDYFPEPVTVSWNSGALTSGVHTFPAVLQSSG

SEQ ID NO: 372 - protein, 123 aa, Homo sapiens
EVQLVESGGGLVQPGGSLRLSCAASGFTVSSNYMSWVRQAPGKGLEWVSDIYSGGSTYYADSVKGRFTISRHNSKNTLYLQMNSLRAEDTAVYYCARDRRGYSYGLHHGMDVWGQGTTVTVSS

SEQ ID NO: 373 - protein, 16 aa, Homo sapiens
DIYSGGSTYYADSVKG

SEQ ID NO: 374 - protein, 15 aa, Homo sapiens
DRRGYSYGLHHGMDV

SEQ ID NO: 375 - protein, 32 aa, Homo sapiens
RFTISRHNSKNTLYLQMNSLRAEDTAVYYCAR

SEQ ID NO: 376 - protein, 153 aa, Homo sapiens
EIVLTQSPGTLSLSPGERATLSCRASQSVSSSYLAWYQQKPDQAPRLLIYGASSRATGIPDRFSGSGSGTDFTLTISRLEPEDFAVYYCQQYGSSPNTFGQGTKLEIKRTVAAPSVFIFPPSDEQLKSGTASVVCLLNNFYPREAKVQWKVDN

SEQ ID NO: 377 - protein, 108 aa, Homo sapiens
EIVLTQSPGTLSLSPGERATLSCRASQSVSSSYLAWYQQKPDQAPRLLIYGASSRATGIPDRFSGSGSGTDFTLTISRLEPEDFAVYYCQQYGSSPNTFGQGTKLEIK

SEQ ID NO: 378 - protein, 9 aa, Homo sapiens
QQYGSSPNT

SEQ ID NO: 379 - protein, 15 aa, Homo sapiens
WYQQKPDQAPRLLIY

SEQ ID NO: 380 - protein, 10 aa, Homo sapiens
FGQGTKLEIK

SEQ ID NO: 381 - protein, 161 aa, Homo sapiens
QLQLQESGPGLVKPSETLSLTCTVSGGSISSSSYYWGWIRQPPGKGLEWIGSIYYSGSTYYNPSLKSRVTISVDTSKNQFSLKLSSVTAADTAVYYCARRIRRPTSEVVITYVFDYWGQGTLVTVSSAPTKAPDVFPIISGCRHPKDNSPVVLACLITGYH

SEQ ID NO: 382 - protein, 127 aa, Homo sapiens
QLQLQESGPGLVKPSETLSLTCTVSGGSISSSSYYWGWIRQPPGKGLEWIGSIYYSGSTYYNPSLKSRVTISVDTSKNQFSLKLSSVTAADTAVYYCARRIRRPTSEVVITYVFDYWGQGTLVTVSS

SEQ ID NO: 383 - protein, 17 aa, Homo sapiens
RIRRPTSEVVITYVFDY

SEQ ID NO: 384 - protein, 175 aa, Homo sapiens
AIQLTQSPSSLSASVGDRVTITCRASQGISSALAWYQQKPGKAPKLLIYDASSLESGVPSRFSGSGSGTDFTLTISSLQPEDFATYYCQQFNSYLTFGGGTKVEIKRTVAAPSVFIFPPSDEQLKSGTASVVCLLNNFYPREAKVQWKVDNALQSGNSQESVTEQDSKDSTYSLS

SEQ ID NO: 385 - protein, 106 aa, Homo sapiens
AIQLTQSPSSLSASVGDRVTITCRASQGISSALAWYQQKPGKAPKLLIYDASSLESGVPSRFSGSGSGTDFTLTISSLQPEDFATYYCQQFNSYLTFGGGTKVEIK

SEQ ID NO: 386 - protein, 11 aa, Homo sapiens
RASQGISSALA

SEQ ID NO: 387 - protein, 7 aa, Homo sapiens
DASSLES

SEQ ID NO: 388 - protein, 8 aa, Homo sapiens
QQFNSYLT

SEQ ID NO: 389 - protein, 23 aa, Homo sapiens
AIQLTQSPSSLSASVGDRVTITC

SEQ ID NO: 390 - protein, 148 aa, Homo sapiens
EVQLVESGGGLVQPGGSLRLSCAASGFTVSSNYMSWVRQAPGKGLEWVSVIYSGGSTYYADSVKGRFTISRHNSKNTLYLQMNSLRAEDTAVYYCAREGYCTNGVCYRHAFDIWGQGTMVTVSSGSASAPTLFPLVSCENSPSDTSSV

SEQ ID NO: 391 - protein, 124 aa, Homo sapiens
EVQLVESGGGLVQPGGSLRLSCAASGFTVSSNYMSWVRQAPGKGLEWVSVIYSGGSTYYADSVKGRFTISRHNSKNTLYLQMNSLRAEDTAVYYCAREGYCTNGVCYRHAFDIWGQGTMVTVSS

SEQ ID NO: 392 - protein, 16 aa, Homo sapiens
VIYSGGSTYYADSVKG

SEQ ID NO: 393 - protein, 16 aa, Homo sapiens
EGYCTNGVCYRHAFDI

SEQ ID NO: 394 - protein, 180 aa, Homo sapiens
QTVVTQEPSFSVSPGGTVTLTCGLSSGSVSTSYYPSWYQQTPGQAPRTLIYSTNTRSSGVPDRFSGSILGNKAALTITGAQADDESDYYCVLYMGSGISVFGGGTKLTVLGQPKAAPSVTLFPPSSEELQANKATLVCLISDFYPGAVTVAWKADSSPVKAGVETTTPSKQSNNKYAASS

SEQ ID NO: 395 - protein, 110 aa, Homo sapiens
QTVVTQEPSFSVSPGGTVTLTCGLSSGSVSTSYYPSWYQQTPGQAPRTLIYSTNTRSSGVPDRFSGSILGNKAALTITGAQADDESDYYCVLYMGSGISVFGGGTKLTVL

SEQ ID NO: 396 - protein, 7 aa, Homo sapiens
STNTRSS

SEQ ID NO: 397 - protein, 10 aa, Homo sapiens
VLYMGSGISV

SEQ ID NO: 398 - protein, 178 aa, Homo sapiens
QVQLQESGPGLVKPSETLSLTCTVSGGSISSYYWSWIRQPPGKGLEWIGYIYYSGSTNYNPSLKSRVTISVDTSKNQFSLKLSSVTAADTAVYYCARDYYQLPMDVWGQGTTVTVSSASTKGPSVFPLAPSSKSTSGGTAALGCLVKDYFPEPVTVSWNSGALTSGVHTFPAVLQSSG

SEQ ID NO: 399 - protein, 117 aa, Homo sapiens
QVQLQESGPGLVKPSETLSLTCTVSGGSISSYYWSWIRQPPGKGLEWIGYIYYSGSTNYNPSLKSRVTISVDTSKNQFSLKLSSVTAADTAVYYCARDYYQLPMDVWGQGTTVTVSS

SEQ ID NO: 400 - protein, 9 aa, Homo sapiens
DYYQLPMDV

SEQ ID NO: 401 - protein, 180 aa, Homo sapiens
QSVLTQPPSASGTPGQRVTISCSGSSSNIGSNYVYWYQQLPGTAPKLLIYRNNQRPSGVPDRFSGSKSGTSASLAISGLRSEDEADYYCAAWDDSLSGRVFGGGTKLTVLGQPKAAPSVTLFPPSSEELQANKATLVCLISDFYPGAVTVAWKADSSPVKAGVETTTPSKQSNNKYAASS

SEQ ID NO: 402 - protein, 110 aa, Homo sapiens
QSVLTQPPSASGTPGQRVTISCSGSSSNIGSNYVYWYQQLPGTAPKLLIYRNNQRPSGVPDRFSGSKSGTSASLAISGLRSEDEADYYCAAWDDSLSGRVFGGGTKLTVL

SEQ ID NO: 403 - protein, 13 aa, Homo sapiens
SGSSSNIGSNYVY

SEQ ID NO: 404 - protein, 7 aa, Homo sapiens
RNNQRPS

SEQ ID NO: 405 - protein, 11 aa, Homo sapiens
AAWDDSLSGRV

SEQ ID NO: 406 - protein, 32 aa, Homo sapiens
GVPDRFSGSKSGTSASLAISGLRSEDEADYYC

SEQ ID NO: 407 - protein, 185 aa, Homo sapiens
EVQLVESGGGLVQPGGSLRLSCAVSGFTFSSYSMNWVRQAPGKGLEWVSYISSSSSIIYYADSVKGRFTISRDNAKNSLYLQMNSLRAEDTAVYYCARDFLDYSRSYSYGMDVWGQGTTVTVSSASTKGPSVFPLAPSSKSTSGGTAALGCLVKDYFPEPVTVSWNSGALTSGVHTFPAVLQSSG

SEQ ID NO: 408 - protein, 124 aa, Homo sapiens
EVQLVESGGGLVQPGGSLRLSCAVSGFTFSSYSMNWVRQAPGKGLEWVSYISSSSSIIYYADSVKGRFTISRDNAKNSLYLQMNSLRAEDTAVYYCARDFLDYSRSYSYGMDVWGQGTTVTVSS

SEQ ID NO: 409 - protein, 17 aa, Homo sapiens
YISSSSSIIYYADSVKG

SEQ ID NO: 410 - protein, 15 aa, Homo sapiens
DFLDYSRSYSYGMDV

SEQ ID NO: 411 - protein, 30 aa, Homo sapiens
EVQLVESGGGLVQPGGSLRLSCAVSGFTFS

SEQ ID NO: 412 - protein, 180 aa, Homo sapiens
SYVLTQPPSVSVAPGQTARITCGGDNIGSKNVHWYQQKPGQAPVLVVFDDSDRPSGIPERFSGSNSGNTATLTISRVEAGDEADYYCQVWDSSSDHYVVFGGGTKLTVLGQPKAAPSVTLFPPSSEELQANKATLVCLISDFYPGAVTVAWKADSSPVKAGVETTTPSKQSNNKYAASSY

SEQ ID NO: 413 - protein, 109 aa, Homo sapiens
SYVLTQPPSVSVAPGQTARITCGGDNIGSKNVHWYQQKPGQAPVLVVFDDSDRPSGIPERFSGSNSGNTATLTISRVEAGDEADYYCQVWDSSSDHYVVFGGGTKLTVL

SEQ ID NO: 414 - protein, 11 aa, Homo sapiens
GGDNIGSKNVH

SEQ ID NO: 415 - protein, 12 aa, Homo sapiens
QVWDSSSDHYVV

SEQ ID NO: 416 - protein, 15 aa, Homo sapiens
WYQQKPGQAPVLVVF

SEQ ID NO: 417 - protein, 130 aa, Homo sapiens
EVQLVESGGGLVQPGRSLRLSCTASGFTFGDYAMSWFRQAPGKGLEWVGFIRSKAYGGTTQYAASVKGRFTISRDDSKSIAYLQMNSLKTEDTAVYYCTRVRYCTNGVCYGYHFDYWGQGTVVTVSSAST

SEQ ID NO: 418 - protein, 127 aa, Homo sapiens
EVQLVESGGGLVQPGRSLRLSCTASGFTFGDYAMSWFRQAPGKGLEWVGFIRSKAYGGTTQYAASVKGRFTISRDDSKSIAYLQMNSLKTEDTAVYYCTRVRYCTNGVCYGYHFDYWGQGTVVTVSS

SEQ ID NO: 419 - protein, 19 aa, Homo sapiens
FIRSKAYGGTTQYAASVKG

SEQ ID NO: 420 - protein, 16 aa, Homo sapiens
VRYCTNGVCYGYHFDY

SEQ ID NO: 421 - protein, 11 aa, Homo sapiens
WGQGTVVTVSS

SEQ ID NO: 422 - protein, 151 aa, Homo sapiens
EIVMTQSPATLSVSPGERATLSCRASQSVSSNLAWYQQKPGQAPRLLIYGASTRATGIPARFSGSGSGTEFTLTISSLQSEDFAVYYCQQYNNWWTFGQGTKVEIKRTVAAPSVFIFPPSDEQLKSGTASVVCLLNNFYPREAKVQWKVDN

SEQ ID NO: 423 - protein, 106 aa, Homo sapiens
EIVMTQSPATLSVSPGERATLSCRASQSVSSNLAWYQQKPGQAPRLLIYGASTRATGIPARFSGSGSGTEFTLTISSLQSEDFAVYYCQQYNNWWTFGQGTKVEIK

SEQ ID NO: 424 - protein, 8 aa, Homo sapiens
QQYNNWWT

SEQ ID NO: 425 - protein, 183 aa, Homo sapiens
QVQLQESGPGLVKPSETLSLTCTVSGGSISSYYWSWIRQPPGKGLEWIGYVYYSGNTKYNPSLKSRVTISVDTSKNQFSLKLGSVTAADTAVYYCARHSRIEVAGTLDFDYWGQGTLVTVSSASTKGPSVFPLAPSSKSTSGGTAALGCLVKDYFPEPVTVSWNSGALTSGVHTFPAVLQSSG

SEQ ID NO: 426 - protein, 122 aa, Homo sapiens
QVQLQESGPGLVKPSETLSLTCTVSGGSISSYYWSWIRQPPGKGLEWIGYVYYSGNTKYNPSLKSRVTISVDTSKNQFSLKLGSVTAADTAVYYCARHSRIEVAGTLDFDYWGQGTLVTVSS

SEQ ID NO: 427 - protein, 16 aa, Homo sapiens
YVYYSGNTKYNPSLKS

SEQ ID NO: 428 - protein, 14 aa, Homo sapiens
HSRIEVAGTLDFDY

SEQ ID NO: 429 - protein, 32 aa, Homo sapiens
RVTISVDTSKNQFSLKLGSVTAADTAVYYCAR

SEQ ID NO: 430 - protein, 152 aa, Homo sapiens
DIQMTQSPSSLSASVGDRVTITCRASQSIRSYLNWYQQKRGKAPKLLIYAASSLQSGVPSRFSGSGSGTDFTLTISSLQPEDFATYYCQQSYSTPPTFGQGTKVEIKRTVAAPSVFIFPPSDEQLKSGTASVVCLLNNFYPREAKVQWKVDN

SEQ ID NO: 431 - protein, 107 aa, Homo sapiens
DIQMTQSPSSLSASVGDRVTITCRASQSIRSYLNWYQQKRGKAPKLLIYAASSLQSGVPSRFSGSGSGTDFTLTISSLQPEDFATYYCQQSYSTPPTFGQGTKVEIK

SEQ ID NO: 432 - protein, 11 aa, Homo sapiens
RASQSIRSYLN

SEQ ID NO: 433 - protein, 9 aa, Homo sapiens
QQSYSTPPT

SEQ ID NO: 434 - protein, 15 aa, Homo sapiens
WYQQKRGKAPKLLIY

SEQ ID NO: 435 - protein, 192 aa, Homo sapiens
QVQLVESGGGVVQPGRSLRLSCAASGFTFSNYGMHWVRQAPGKGLEWVAVIWYDGSNKYYADSVKGRFTISRDNSKNTLYLQMNSLRAEDTAVYYCARGDCTNGVCHPLLIYYDSSGLDYWGQGTLVTVSSASTKGPSVFPLAPSSKSTSGGTAALGCLVKDYFPEPVTVSWNSGALTSGVHTFPAVLQSSG

SEQ ID NO: 436 - protein, 131 aa, Homo sapiens
QVQLVESGGGVVQPGRSLRLSCAASGFTFSNYGMHWVRQAPGKGLEWVAVIWYDGSNKYYADSVKGRFTISRDNSKNTLYLQMNSLRAEDTAVYYCARGDCTNGVCHPLLIYYDSSGLDYWGQGTLVTVSS

SEQ ID NO: 437 - protein, 5 aa, Homo sapiens
NYGMH

SEQ ID NO: 438 - protein, 22 aa, Homo sapiens
GDCTNGVCHPLLIYYDSSGLDY

SEQ ID NO: 439 - protein, 176 aa, Homo sapiens
EIVLTQSPATLSLSPGERATLSCRASQSVSSYLAWYQQKPGQAPRLLIYDASNRATGIPARFSGSGSGTDFTLTISSLEPEDFAVYYCQQRSNWPPITFGPGTKVDIKRTVAAPSVFIFPPSDEQLKSGTASVVCLLNNFYPREAKVQWKVDNALQSGNSQESVTEQDSKDSTYSL

SEQ ID NO: 440 - protein, 108 aa, Homo sapiens
EIVLTQSPATLSLSPGERATLSCRASQSVSSYLAWYQQKPGQAPRLLIYDASNRATGIPARFSGSGSGTDFTLTISSLEPEDFAVYYCQQRSNWPPITFGPGTKVDIK

SEQ ID NO: 441 - protein, 7 aa, Homo sapiens
DASNRAT

SEQ ID NO: 442 - protein, 10 aa, Homo sapiens
QQRSNWPPIT

SEQ ID NO: 443 - protein, 10 aa, Homo sapiens
FGPGTKVDIK

SEQ ID NO: 444 - protein, 156 aa, Homo sapiens
QVQLVESGGGVVQPGRSLRLSCAASGFTFTSYAMHWVRQAPGKGLEWVAVISYDGGSKYYADSVKGRFTISRDNSKNTLYLQMNSLRAEDTAVYYCARTTPGITAAGTGTLGRYYYYGMDVWGQGTTVTVSSGSASAPTLFPLVSCENSPSDTSSV

SEQ ID NO: 445 - protein, 132 aa, Homo sapiens
QVQLVESGGGVVQPGRSLRLSCAASGFTFTSYAMHWVRQAPGKGLEWVAVISYDGGSKYYADSVKGRFTISRDNSKNTLYLQMNSLRAEDTAVYYCARTTPGITAAGTGTLGRYYYYGMDVWGQGTTVTVSS

SEQ ID NO: 446 - protein, 5 aa, Homo sapiens
SYAMH

SEQ ID NO: 447 - protein, 17 aa, Homo sapiens
VISYDGGSKYYADSVKG

SEQ ID NO: 448 - protein, 23 aa, Homo sapiens
TTPGITAAGTGTLGRYYYYGMDV

SEQ ID NO: 449 - protein, 30 aa, Homo sapiens
QVQLVESGGGVVQPGRSLRLSCAASGFTFT

SEQ ID NO: 450 - protein, 187 aa, Homo sapiens
AIQLTQSPSSLSASVGDRVTITCRASQGISSALAWYQQTPGKAPKLLIYDASSLESGVPSRFSGSGSGTDFSLTIGSLQPEDFASYYCQQFNSYPLTFGGGTKVEIKRTVAAPSVFIFPPSDEQLKSGTASVVCLLNNFYPREAKVQWKVDNALQSGNSQESVTEQDSKDSTYSLSSTLTLSKADYE

SEQ ID NO: 451 - protein, 107 aa, Homo sapiens
AIQLTQSPSSLSASVGDRVTITCRASQGISSALAWYQQTPGKAPKLLIYDASSLESGVPSRFSGSGSGTDFSLTIGSLQPEDFASYYCQQFNSYPLTFGGGTKVEIK

SEQ ID NO: 452 - protein, 9 aa, Homo sapiens
QQFNSYPLT

SEQ ID NO: 453 - protein, 15 aa, Homo sapiens
WYQQTPGKAPKLLIY

SEQ ID NO: 454 - protein, 32 aa, Homo sapiens
GVPSRFSGSGSGTDFSLTIGSLQPEDFASYYC

SEQ ID NO: 455 - protein, 186 aa, Homo sapiens
QVQLVQSGAEVKKPGASVKVSCKVSGYTLIELSMHWVRQAPGKGLEWMGGFDPEDGETIYAQKFQGRVTMTEDTSTDTAYMALSSLTSEDTAVYYCATAYAYYYASGGYYTLDYWGQGTLVTVSSASTKGPSVFPLAPSSKSTSGGTAALGCLVKDYFPEPVTVSWNSGALTSGVHTFPAVLQSSG

SEQ ID NO: 456 - protein, 125 aa, Homo sapiens
QVQLVQSGAEVKKPGASVKVSCKVSGYTLIELSMHWVRQAPGKGLEWMGGFDPEDGETIYAQKFQGRVTMTEDTSTDTAYMALSSLTSEDTAVYYCATAYAYYYASGGYYTLDYWGQGTLVTVSS

SEQ ID NO: 457 - protein, 5 aa, Homo sapiens
ELSMH

SEQ ID NO: 458 - protein, 17 aa, Homo sapiens
GFDPEDGETIYAQKFQG

SEQ ID NO: 459 - protein, 16 aa, Homo sapiens
AYAYYYASGGYYTLDY

SEQ ID NO: 460 - protein, 30 aa, Homo sapiens
QVQLVQSGAEVKKPGASVKVSCKVSGYTLI

SEQ ID NO: 461 - protein, 32 aa, Homo sapiens
RVTMTEDTSTDTAYMALSSLTSEDTAVYYCAT

SEQ ID NO: 462 - protein, 180 aa, Homo sapiens
QAGLTQPPSVSKGLRQTATLTCTGSSNNVGNQGAAWLQQHQGHPPKLLSYRNNNRPSGISERFSASRSGNTASLTITGLQPEDEADYYCSAWDSSLSNWVFGGGTKLTVLGQPKAAPSVTLFPPSSEELQANKATLVCLISDFYPGAVTVAWKADSSPVKAGVETTTPSKQSNNKYAASS

SEQ ID NO: 463 - protein, 110 aa, Homo sapiens
QAGLTQPPSVSKGLRQTATLTCTGSSNNVGNQGAAWLQQHQGHPPKLLSYRNNNRPSGISERFSASRSGNTASLTITGLQPEDEADYYCSAWDSSLSNWVFGGGTKLTVL

SEQ ID NO: 464 - protein, 13 aa, Homo sapiens
TGSSNNVGNQGAA

SEQ ID NO: 465 - protein, 7 aa, Homo sapiens
RNNNRPS

SEQ ID NO: 466 - protein, 11 aa, Homo sapiens
SAWDSSLSNWV

SEQ ID NO: 467 - protein, 22 aa, Homo sapiens
QAGLTQPPSVSKGLRQTATLTC

SEQ ID NO: 468 - protein, 15 aa, Homo sapiens
WLQQHQGHPPKLLSY

SEQ ID NO: 469 - protein, 32 aa, Homo sapiens
GISERFSASRSGNTASLTITGLQPEDEADYYC

SEQ ID NO: 470 - protein, 143 aa, Homo sapiens
QITLKESGPTLVKPTQTLTLTCTFSGFSLNTSGVGVGWIRQPPGKALEWLALIYWDDDKRYSPSLKSRLTITKDTSKNQVVLTMTNMDPVDTATYYCAHHTIVPIFDYWGQGTLVTVSSGSASAPTLFPLVSCENSPSDTSSV

SEQ ID NO: 471 - protein, 119 aa, Homo sapiens
QITLKESGPTLVKPTQTLTLTCTFSGFSLNTSGVGVGWIRQPPGKALEWLALIYWDDDKRYSPSLKSRLTITKDTSKNQVVLTMTNMDPVDTATYYCAHHTIVPIFDYWGQGTLVTVSS

SEQ ID NO: 472 - protein, 7 aa, Homo sapiens
TSGVGVG

SEQ ID NO: 473 - protein, 16 aa, Homo sapiens
LIYWDDDKRYSPSLKS

SEQ ID NO: 474 - protein, 9 aa, Homo sapiens
HTIVPIFDY

SEQ ID NO: 475 - protein, 30 aa, Homo sapiens
QITLKESGPTLVKPTQTLTLTCTFSGFSLN

SEQ ID NO: 476 - protein, 14 aa, Homo sapiens
WIRQPPGKALEWLA

SEQ ID NO: 477 - protein, 32 aa, Homo sapiens
RLTITKDTSKNQVVLTMTNMDPVDTATYYCAH

SEQ ID NO: 478 - protein, 186 aa, Homo sapiens
QSALTQPASVSGSPGQSITISCTGTSSDVGGYNYVSWYQQHPGKAPKLMIYDVSNRPSGVSNRFSGSKSGNTASLTISGLQAEDEADYYCNSYTSSSTLVVFGGGTKLTVLGQPKAAPSVTLFPPSSEELQANKATLVCLISDFYPGAVTVAWKADSSPVKAGVETTTPSKQSNNKYAASSYLSLT

SEQ ID NO: 479 - protein, 111 aa, Homo sapiens
QSALTQPASVSGSPGQSITISCTGTSSDVGGYNYVSWYQQHPGKAPKLMIYDVSNRPSGVSNRFSGSKSGNTASLTISGLQAEDEADYYCNSYTSSSTLVVFGGGTKLTVL

SEQ ID NO: 480 - protein, 11 aa, Homo sapiens
NSYTSSSTLVV

SEQ ID NO: 481 - protein, 186 aa, Homo sapiens
QVQLQESGPGLVKPSETLSLTCTVSGGSISSYYWSWIRQPPGKGLEWIGNIYNSGSTNYNPSLKSRLTISVDTSKNHFSLKLSSVTAADTAVYYCARGGLEHDGDYVYYYGMDVWGQGTTITVSSASTKGPSVFPLAPSSKSTSGGTAALGCLVKDYFPEPVTVSWNSGALTSGVHTFPAVLQSSG

SEQ ID NO: 482 - protein, 125 aa, Homo sapiens
QVQLQESGPGLVKPSETLSLTCTVSGGSISSYYWSWIRQPPGKGLEWIGNIYNSGSTNYNPSLKSRLTISVDTSKNHFSLKLSSVTAADTAVYYCARGGLEHDGDYVYYYGMDVWGQGTTITVSS

SEQ ID NO: 483 - protein, 16 aa, Homo sapiens
NIYNSGSTNYNPSLKS

SEQ ID NO: 484 - protein, 17 aa, Homo sapiens
GGLEHDGDYVYYYGMDV

SEQ ID NO: 485 - protein, 32 aa, Homo sapiens
RLTISVDTSKNHFSLKLSSVTAADTAVYYCAR

SEQ ID NO: 486 - protein, 11 aa, Homo sapiens
WGQGTTITVSS

SEQ ID NO: 487 - protein, 177 aa, Homo sapiens
SYELTQPPSVSVSLGQMARITCSGEALPKKYAYWYQQKPGQFPILVIYKDSERPSGIPERFSGSSSGTIVTLTISGVQAEDEADYYCLSEDSSGTWVFGGGTKLTVLGQPKAAPSVTLFPPSSEELQANKATLVCLISDFYPGAVTVAWKADSSPVKAGVETTTPSKQSNNKYAASS

SEQ ID NO: 488 - protein, 107 aa, Homo sapiens
SYELTQPPSVSVSLGQMARITCSGEALPKKYAYWYQQKPGQFPILVIYKDSERPSGIPERFSGSSSGTIVTLTISGVQAEDEADYYCLSEDSSGTWVFGGGTKLTVL

SEQ ID NO: 489 - protein, 11 aa, Homo sapiens
SGEALPKKYAY

SEQ ID NO: 490 - protein, 7 aa, Homo sapiens
KDSERPS

SEQ ID NO: 491 - protein, 10 aa, Homo sapiens
LSEDSSGTWV

SEQ ID NO: 492 - protein, 22 aa, Homo sapiens
SYELTQPPSVSVSLGQMARITC

SEQ ID NO: 493 - protein, 15 aa, Homo sapiens
WYQQKPGQFPILVIY

SEQ ID NO: 494 - protein, 32 aa, Homo sapiens
GIPERFSGSSSGTIVTLTISGVQAEDEADYYC

SEQ ID NO: 495 - protein, 158 aa, Homo sapiens
QVQLVESGGGVVQPGRSLRLSCAASGFTFSSYGMHWVRQAPGKGLEWVAVISYDGSNKYYADSVKGRFTISRDNSKNTLYLQMNSLRAEDTAVYYCAKYTSTVTTNYYYGMDVWGQGTTVTVSSAPTKAPDVFPIISGCRHPKDNSPVVLACLITGYH

SEQ ID NO: 496 - protein, 124 aa, Homo sapiens
QVQLVESGGGVVQPGRSLRLSCAASGFTFSSYGMHWVRQAPGKGLEWVAVISYDGSNKYYADSVKGRFTISRDNSKNTLYLQMNSLRAEDTAVYYCAKYTSTVTTNYYYGMDVWGQGTTVTVSS

SEQ ID NO: 497 - protein, 17 aa, Homo sapiens
VISYDGSNKYYADSVKG

SEQ ID NO: 498 - protein, 15 aa, Homo sapiens
YTSTVTTNYYYGMDV

SEQ ID NO: 499 - protein, 32 aa, Homo sapiens
RFTISRDNSKNTLYLQMNSLRAEDTAVYYCAK

SEQ ID NO: 500 - protein, 177 aa, Homo sapiens
SYELTQPPSVSVSPGQTASITCSGDKLGDKYACWYQQKPGQSPVLVIYQDSKRPSGIPERFSGSNSGNTATLTISGTQAMDEADYYCQAWDSSTVVFGGGTKLTVLGQPKAAPSVTLFPPSSEELQANKATLVCLISDFYPGAVTVAWKADSSPVKAGVETTTPSKQSNNKYAASSY

SEQ ID NO: 501 - protein, 106 aa, Homo sapiens
SYELTQPPSVSVSPGQTASITCSGDKLGDKYACWYQQKPGQSPVLVIYQDSKRPSGIPERFSGSNSGNTATLTISGTQAMDEADYYCQAWDSSTVVFGGGTKLTVL

SEQ ID NO: 502 - protein, 11 aa, Homo sapiens
SGDKLGDKYAC

SEQ ID NO: 503 - protein, 7 aa, Homo sapiens
QDSKRPS

SEQ ID NO: 504 - protein, 9 aa, Homo sapiens
QAWDSSTVV

SEQ ID NO: 505 - protein, 147 aa, Homo sapiens
QVQLVESGGGVVQPGRSLRLSCAASGFTFSSYGMHWVRQAPGKGLEWVAVIWYDGSNKYYADSVKGRFTISRDNSKNTLYLQMNSLRAEDTAVYYCARGRSPGGGHYYGMDVWGQGTTVTVSSGSASAPTLFPLVSCENSPSDTSSV

SEQ ID NO: 506 - protein, 123 aa, Homo sapiens
QVQLVESGGGVVQPGRSLRLSCAASGFTFSSYGMHWVRQAPGKGLEWVAVIWYDGSNKYYADSVKGRFTISRDNSKNTLYLQMNSLRAEDTAVYYCARGRSPGGGHYYGMDVWGQGTTVTVSS

SEQ ID NO: 507 - protein, 14 aa, Homo sapiens
GRSPGGGHYYGMDV

SEQ ID NO: 508 - protein, 176 aa, Homo sapiens
SYELTQPPSVSVSPGQTASITCSGDKLGDKYACWYQQKPGQSPVLVIYQDSKRPSGIPERFSGSNSGNTATLTISGTQAMDEADYYCQAWDSSSVVFGGGTKLTVLGQPKAAPSVTLFPPSSEELQANKATLVCLISDFYPGAVTVAWKADSSPVKAGVETTTPSKQSNNKYAASS

SEQ ID NO: 509 - protein, 106 aa, Homo sapiens
SYELTQPPSVSVSPGQTASITCSGDKLGDKYACWYQQKPGQSPVLVIYQDSKRPSGIPERFSGSNSGNTATLTISGTQAMDEADYYCQAWDSSSVVFGGGTKLTVL

SEQ ID NO: 510 - protein, 9 aa, Homo sapiens
QAWDSSSVV

SEQ ID NO: 511 - protein, 148 aa, Homo sapiens
QVTLRESGPALVKPTQTLTLTCTFSGLSLSSSGMCVSWIRQPPGKALEWLARIDWDDDKYYSTSLKTRLTISKDTSKNQVVLTMTNMDPVDTATYYCARICTMVRGLHDAFDIWGQGTMVTVSSGSASAPTLFPLVSCENSPSDTSSV

SEQ ID NO: 512 - protein, 124 aa, Homo sapiens
QVTLRESGPALVKPTQTLTLTCTFSGLSLSSSGMCVSWIRQPPGKALEWLARIDWDDDKYYSTSLKTRLTISKDTSKNQVVLTMTNMDPVDTATYYCARICTMVRGLHDAFDIWGQGTMVTVSS

SEQ ID NO: 513 - protein, 7 aa, Homo sapiens
SSGMCVS

SEQ ID NO: 514 - protein, 16 aa, Homo sapiens
RIDWDDDKYYSTSLKT

SEQ ID NO: 515 - protein, 14 aa, Homo sapiens
ICTMVRGLHDAFDI

SEQ ID NO: 516 - protein, 30 aa, Homo sapiens
QVTLRESGPALVKPTQTLTLTCTFSGLSLS

SEQ ID NO: 517 - protein, 32 aa, Homo sapiens
RLTISKDTSKNQVVLTMTNMDPVDTATYYCAR

SEQ ID NO: 518 - protein, 152 aa, Homo sapiens
DIQMTQSPSTLSASVGDRVTITCRASQSISSWLAWYQQKPGKAPKLLIYKASSLESGVPSRFSGSGSGTEFTLTISSLQPDDFATYYCQQYNSYSWTFGQGTKVEIKRTVAAPSVFIFPPSDEQLKSGTASVVCLLNNFYPREAKVQWKVDN

SEQ ID NO: 519 - protein, 107 aa, Homo sapiens
DIQMTQSPSTLSASVGDRVTITCRASQSISSWLAWYQQKPGKAPKLLIYKASSLESGVPSRFSGSGSGTEFTLTISSLQPDDFATYYCQQYNSYSWTFGQGTKVEIK

SEQ ID NO: 520 - protein, 11 aa, Homo sapiens
RASQSISSWLA

SEQ ID NO: 521 - protein, 7 aa, Homo sapiens
KASSLES

SEQ ID NO: 522 - protein, 9 aa, Homo sapiens
QQYNSYSWT

SEQ ID NO: 523 - protein, 23 aa, Homo sapiens
DIQMTQSPSTLSASVGDRVTITC

SEQ ID NO: 524 - protein, 32 aa, Homo sapiens
GVPSRFSGSGSGTEFTLTISSLQPDDFATYYC

SEQ ID NO: 525 - protein, 185 aa, Homo sapiens
EVQLVQSGAEVKKPGESLKISCKGSGYSFTTYWIAWVRQMPGKGLEWVGIIYPDDSDTRYSPSFQGQVTISADKSIGTAYLQWSSLKASDTAMYYCARGQYYDFWSGAGGVDVWGQGTTVTVSSASTKGPSVFPLAPSSKSTSGGTAALGCLVKDYFPEPVTVSWNSGALTSGVHTFPAVLQSSG

SEQ ID NO: 526 - protein, 124 aa, Homo sapiens
EVQLVQSGAEVKKPGESLKISCKGSGYSFTTYWIAWVRQMPGKGLEWVGIIYPDDSDTRYSPSFQGQVTISADKSIGTAYLQWSSLKASDTAMYYCARGQYYDFWSGAGGVDVWGQGTTVTVSS

SEQ ID NO: 527 - protein, 5 aa, Homo sapiens
TYWIA

SEQ ID NO: 528 - protein, 17 aa, Homo sapiens
IIYPDDSDTRYSPSFQG

SEQ ID NO: 529 - protein, 15 aa, Homo sapiens
GQYYDFWSGAGGVDV

SEQ ID NO: 530 - protein, 30 aa, Homo sapiens
EVQLVQSGAEVKKPGESLKISCKGSGYSFT

SEQ ID NO: 531 - protein, 14 aa, Homo sapiens
WVRQMPGKGLEWVG

SEQ ID NO: 532 - protein, 32 aa, Homo sapiens
QVTISADKSIGTAYLQWSSLKASDTAMYYCAR

SEQ ID NO: 533 - protein, 194 aa, Homo sapiens
QSVLTQPPSVSGAPGQRVTISCTGSRSNIGAGYDVQWYQQVPGTAPKLLISGNSNRPSGVPDRFSGSKSGTSASLAITGLQAEDEADYYCQSYDSSLSGLRVFGGGTKLTVLGQPKAAPSVTLFPPSSEELQANKATLVCLISDFYPGAVTVAWKADSSPVKAGVETTTPSKQSNNKYAASSYLSLTPEQWKSH

SEQ ID NO: 534 - protein, 112 aa, Homo sapiens
QSVLTQPPSVSGAPGQRVTISCTGSRSNIGAGYDVQWYQQVPGTAPKLLISGNSNRPSGVPDRFSGSKSGTSASLAITGLQAEDEADYYCQSYDSSLSGLRVFGGGTKLTVL

SEQ ID NO: 535 - protein, 14 aa, Homo sapiens
TGSRSNIGAGYDVQ

SEQ ID NO: 536 - protein, 12 aa, Homo sapiens
QSYDSSLSGLRV

SEQ ID NO: 537 - protein, 22 aa, Homo sapiens
QSVLTQPPSVSGAPGQRVTISC

SEQ ID NO: 538 - protein, 15 aa, Homo sapiens
WYQQVPGTAPKLLIS

SEQ ID NO: 539 - protein, 32 aa, Homo sapiens
GVPDRFSGSKSGTSASLAITGLQAEDEADYYC

SEQ ID NO: 540 - protein, 179 aa, Homo sapiens
EVQLVQSGAEVKKPGESLKISCKGSGYSFTSYWIGWVRQMPGKGLEWMGIIYPGDSDTRYSPSFQGQVTISADKSITTAYLQWSSLKASDTAMYYCARTQTTNWFDSWGQGTLVTVSSASTKGPSVFPLAPSSKSTSGGTAALGCLVKDYFPEPVTVSWNSGALTSGVHTFPAVLQSSG

SEQ ID NO: 541 - protein, 118 aa, Homo sapiens
EVQLVQSGAEVKKPGESLKISCKGSGYSFTSYWIGWVRQMPGKGLEWMGIIYPGDSDTRYSPSFQGQVTISADKSITTAYLQWSSLKASDTAMYYCARTQTTNWFDSWGQGTLVTVSS

SEQ ID NO: 542 - protein, 5 aa, Homo sapiens
SYWIG

SEQ ID NO: 543 - protein, 17 aa, Homo sapiens
IIYPGDSDTRYSPSFQG

SEQ ID NO: 544 - protein, 9 aa, Homo sapiens
TQTTNWFDS

SEQ ID NO: 545 - protein, 32 aa, Homo sapiens
QVTISADKSITTAYLQWSSLKASDTAMYYCAR

SEQ ID NO: 546 - protein, 186 aa, Homo sapiens
DIQMTQSPSTLSVSVGDRVTITCRASQSVSSWLAWYQQKPGKAPKLLIYDASSLESGVPSRFSGSGSGTEFTLTISSLQPDDFATYYCQQYNSFYTFGQGTKLEIKRTVAAPSVFIFPPSDEQLKSGTASVVCLLNNFYPREAKVQWKVDNALQSGNSQESVTEQDSKDSTYSLSSTLTLSKADYE

SEQ ID NO: 547 - protein, 106 aa, Homo sapiens
DIQMTQSPSTLSVSVGDRVTITCRASQSVSSWLAWYQQKPGKAPKLLIYDASSLESGVPSRFSGSGSGTEFTLTISSLQPDDFATYYCQQYNSFYTFGQGTKLEIK

SEQ ID NO: 548 - protein, 11 aa, Homo sapiens
RASQSVSSWLA

SEQ ID NO: 549 - protein, 8 aa, Homo sapiens
QQYNSFYT

SEQ ID NO: 550 - protein, 23 aa, Homo sapiens
DIQMTQSPSTLSVSVGDRVTITC

SEQ ID NO: 551 - protein, 189 aa, Homo sapiens
QVQLVESGGGVVQPGGSLRLSCAASGFTFSSYGMHWVRQAPGKGLEWVTFTRYDGSNKFYADSVKGRFSISRDNSKNTLYLQMNSLRAEDTAVYYCAKESRVAFGGAIAIYYFGMDVWGQGTTVTVSSASTKGPSVFPLAPCSRSTSGGTAALGCLVKDYFPEPVTVSWNSGALTSGVHTFPAVLQSSG

SEQ ID NO: 552 - protein, 128 aa, Homo sapiens
QVQLVESGGGVVQPGGSLRLSCAASGFTFSSYGMHWVRQAPGKGLEWVTFTRYDGSNKFYADSVKGRFSISRDNSKNTLYLQMNSLRAEDTAVYYCAKESRVAFGGAIAIYYFGMDVWGQGTTVTVSS

SEQ ID NO: 553 - protein, 17 aa, Homo sapiens
FTRYDGSNKFYADSVKG

SEQ ID NO: 554 - protein, 19 aa, Homo sapiens
ESRVAFGGAIAIYYFGMDV

SEQ ID NO: 555 - protein, 30 aa, Homo sapiens
QVQLVESGGGVVQPGGSLRLSCAASGFTFS

SEQ ID NO: 556 - protein, 14 aa, Homo sapiens
WVRQAPGKGLEWVT

SEQ ID NO: 557 - protein, 32 aa, Homo sapiens
RFSISRDNSKNTLYLQMNSLRAEDTAVYYCAK

SEQ ID NO: 558 - protein, 193 aa, Homo sapiens
DIVMTQSPLSLPVTPGEPASISCRSSQSLLHSNGYNYLDWYLQKPGQSPQLLIYLGSNRASGVPDRFSGSGSGTDFTLKISRVEAEDVGVYYCMQALQTPQYTFGQGTKLEIKRTVAAPSVFIFPPSDEQLKSGTASVVCLLNNFYPREAKVQWKVDNALQSGNSQESVTEQDSKDSTYSLSSTLTLSKADYE

SEQ ID NO: 559 - protein, 113 aa, Homo sapiens
DIVMTQSPLSLPVTPGEPASISCRSSQSLLHSNGYNYLDWYLQKPGQSPQLLIYLGSNRASGVPDRFSGSGSGTDFTLKISRVEAEDVGVYYCMQALQTPQYTFGQGTKLEIK

SEQ ID NO: 560 - protein, 10 aa, Homo sapiens
MQALQTPQYT

SEQ ID NO: 561 - protein, 184 aa, Homo sapiens
EVQLLESGGGLVQPGGSLRLSCAASGFTFSNYAMSWVRQAPGKGLEWVSAIRNSGSSTYYADSVKGRFTISRDNSKNTLYLQMNSLRAEDSAVYYCAKVGGTAAGHPFYDYWGQGTLVTVSSASTKGPSVFPLAPSSKSTSGGTAALGCLVKDYFPEPVTVSWNSGALTSGVHTFPAVLQSSGL

SEQ ID NO: 562 - protein, 122 aa, Homo sapiens
EVQLLESGGGLVQPGGSLRLSCAASGFTFSNYAMSWVRQAPGKGLEWVSAIRNSGSSTYYADSVKGRFTISRDNSKNTLYLQMNSLRAEDSAVYYCAKVGGTAAGHPFYDYWGQGTLVTVSS

SEQ ID NO: 563 - protein, 5 aa, Homo sapiens
NYAMS

SEQ ID NO: 564 - protein, 17 aa, Homo sapiens
AIRNSGSSTYYADSVKG

SEQ ID NO: 565 - protein, 13 aa, Homo sapiens
VGGTAAGHPFYDY

SEQ ID NO: 566 - protein, 30 aa, Homo sapiens
EVQLLESGGGLVQPGGSLRLSCAASGFTFS

SEQ ID NO: 567 - protein, 32 aa, Homo sapiens
RFTISRDNSKNTLYLQMNSLRAEDSAVYYCAK

SEQ ID NO: 568 - protein, 186 aa, Homo sapiens
DIQMTQSPSSLSASVGDRVTITCRASQSISNYLNWYQQKPGKAPDLLIYAASSLQSGVPLRFSGSGSGTDFTLTISSLQPEDFATYYCQQTYSAPTFGGGTKVEIKRTVAAPSVFIFPPSDEQLKSGTASVVCLLNNFYPREAKVQWKVDNALQSGNSQESVTEQDSKDSTYSLSSTLTLSKADYE

SEQ ID NO: 569 - protein, 106 aa, Homo sapiens
DIQMTQSPSSLSASVGDRVTITCRASQSISNYLNWYQQKPGKAPDLLIYAASSLQSGVPLRFSGSGSGTDFTLTISSLQPEDFATYYCQQTYSAPTFGGGTKVEIK

SEQ ID NO: 570 - protein, 11 aa, Homo sapiens
RASQSISNYLN

SEQ ID NO: 571 - protein, 8 aa, Homo sapiens
QQTYSAPT

SEQ ID NO: 572 - protein, 15 aa, Homo sapiens
WYQQKPGKAPDLLIY

SEQ ID NO: 573 - protein, 32 aa, Homo sapiens
GVPLRFSGSGSGTDFTLTISSLQPEDFATYYC

SEQ ID NO: 574 - protein, 181 aa, Homo sapiens
QVQLVQSGAEVKKPGASVKVSCKASGYTFTGYYMHWVRQAPGQGLEWMGRINPNSGGTNFAQRFQGRVSMTRDTSISTAYMELSSLRSDDTAVYYCARGAKFEHLPFDIWGQGTMVTVSSASTKGPSVFPLAPSSKSTSGGTAALGCLVKDYFPEPVTVSWNSGALTSGVHTFPAVLQSSG

SEQ ID NO: 575 - protein, 120 aa, Homo sapiens
QVQLVQSGAEVKKPGASVKVSCKASGYTFTGYYMHWVRQAPGQGLEWMGRINPNSGGTNFAQRFQGRVSMTRDTSISTAYMELSSLRSDDTAVYYCARGAKFEHLPFDIWGQGTMVTVSS

SEQ ID NO: 576 - protein, 17 aa, Homo sapiens
RINPNSGGTNFAQRFQG

SEQ ID NO: 577 - protein, 11 aa, Homo sapiens
GAKFEHLPFDI

SEQ ID NO: 578 - protein, 32 aa, Homo sapiens
RVSMTRDTSISTAYMELSSLRSDDTAVYYCAR

SEQ ID NO: 579 - protein, 178 aa, Homo sapiens
QSMLTQPPSASGTPGQRVTISCSGSSSNIGSNYVYWYQQLPGTAPKLLIYRNNQRPSGVPDRFSGSKSGTSASLAISGLRSEDEADYYCAAWDDRRWVFGGGTKLTVLGQPKAAPSVTLFPPSSEELQANKATLVCLISDFYPGAVTVAWKADSSPVKAGVETTTPSKQSNNKYAASS

SEQ ID NO: 580 - protein, 108 aa, Homo sapiens
QSMLTQPPSASGTPGQRVTISCSGSSSNIGSNYVYWYQQLPGTAPKLLIYRNNQRPSGVPDRFSGSKSGTSASLAISGLRSEDEADYYCAAWDDRRWVFGGGTKLTVL

SEQ ID NO: 581 - protein, 9 aa, Homo sapiens
AAWDDRRWV

SEQ ID NO: 582 - protein, 22 aa, Homo sapiens
QSMLTQPPSASGTPGQRVTISC

SEQ ID NO: 583 - protein, 186 aa, Homo sapiens
QVQLVQSGAEVKKPGASVKVSCKSSGYTFTGYYMHWVRQAPGQGLEWMGRINPNSGGTNYAQKFQGRVTMTRDTSISTAYMELSRLRSDDTAVYYCARGARGGAGCSGWSCFDFWGQGTLVTVSSASTKGPSVFPLAPSSKSTSGGTAALGCLVKDYFPEPVTVSWNSGALTSGVHTFPAVLQSSG

SEQ ID NO: 584 - protein, 125 aa, Homo sapiens
QVQLVQSGAEVKKPGASVKVSCKSSGYTFTGYYMHWVRQAPGQGLEWMGRINPNSGGTNYAQKFQGRVTMTRDTSISTAYMELSRLRSDDTAVYYCARGARGGAGCSGWSCFDFWGQGTLVTVSS

SEQ ID NO: 585 - protein, 17 aa, Homo sapiens
RINPNSGGTNYAQKFQG

SEQ ID NO: 586 - protein, 16 aa, Homo sapiens
GARGGAGCSGWSCFDF

SEQ ID NO: 587 - protein, 30 aa, Homo sapiens
QVQLVQSGAEVKKPGASVKVSCKSSGYTFT

SEQ ID NO: 588 - protein, 32 aa, Homo sapiens
RVTMTRDTSISTAYMELSRLRSDDTAVYYCAR

SEQ ID NO: 589 - protein, 194 aa, Homo sapiens
QSALTQPRSVSGSPGQSVTISCTGTSSDVGGYKYVSWYQQHPGKAPKLMIYDVSKRPSGVPDRFSGSKSGNTASLTISGLQAEDEGDYYCCSYAGTYSLVFGGGTKVTVTVLGQPKAAPSVTLFPPSSEELQANKATLVCLISDFYPGAVTVAWKADSSPVKAGVETTTPSKQSNNKYAASSYLSLTPEQWKSH

SEQ ID NO: 590 - protein, 109 aa, Homo sapiens
QSALTQPRSVSGSPGQSVTISCTGTSSDVGGYKYVSWYQQHPGKAPKLMIYDVSKRPSGVPDRFSGSKSGNTASLTISGLQAEDEGDYYCCSYAGTYSLVFGGGTKVTV

SEQ ID NO: 591 - protein, 14 aa, Homo sapiens
TGTSSDVGGYKYVS

SEQ ID NO: 592 - protein, 7 aa, Homo sapiens
DVSKRPS

SEQ ID NO: 593 - protein, 10 aa, Homo sapiens
CSYAGTYSLV

SEQ ID NO: 594 - protein, 22 aa, Homo sapiens
QSALTQPRSVSGSPGQSVTISC

SEQ ID NO: 595 - protein, 32 aa, Homo sapiens
GVPDRFSGSKSGNTASLTISGLQAEDEGDYYC

SEQ ID NO: 596 - protein, 9 aa, Homo sapiens
FGGGTKVTV

SEQ ID NO: 597 - protein, 183 aa, Homo sapiens
EVQLVESGGGLVKPGGSLRLSCAASGFTFSDYTMNWVRQAPGKGLEWVSSITRSSTYIYYADSVKGRFTISRDNAKNSLYLQMNSLRAEDTAVYYCARDPYYDILTGYWNYWGQGTLVTVSSASTKGPSVFPLAPSSKSTSGGTAALGCLVKDYFPEPVTVSWNSGALTSGVHTFPAVLQSSG

SEQ ID NO: 598 - protein, 122 aa, Homo sapiens
EVQLVESGGGLVKPGGSLRLSCAASGFTFSDYTMNWVRQAPGKGLEWVSSITRSSTYIYYADSVKGRFTISRDNAKNSLYLQMNSLRAEDTAVYYCARDPYYDILTGYWNYWGQGTLVTVSS

SEQ ID NO: 599 - protein, 5 aa, Homo sapiens
DYTMN

SEQ ID NO: 600 - protein, 17 aa, Homo sapiens
SITRSSTYIYYADSVKG

SEQ ID NO: 601 - protein, 13 aa, Homo sapiens
DPYYDILTGYWNY

SEQ ID NO: 602 - protein, 30 aa, Homo sapiens
EVQLVESGGGLVKPGGSLRLSCAASGFTFS

SEQ ID NO: 603 - protein, 189 aa, Homo sapiens
EIVLTQSPGTLSLSPGERATLSCRASQSLSSSYLAWYQQKPGQSPRLLIYGASSRATGIPDRFSGSGSGTDFTLTINRLEPEDFAVYYCQQYRTSPRGTFGGGTKVEIKRTVAAPSVFIFPPSDEQLKSGTASVVCLLNNFYPREAKVQWKVDNALQSGNSQESVTEQDSKDSTYSLSSTLTLSKADYE

SEQ ID NO: 604 - protein, 109 aa, Homo sapiens
EIVLTQSPGTLSLSPGERATLSCRASQSLSSSYLAWYQQKPGQSPRLLIYGASSRATGIPDRFSGSGSGTDFTLTINRLEPEDFAVYYCQQYRTSPRGTFGGGTKVEIK

SEQ ID NO: 605 - protein, 12 aa, Homo sapiens
RASQSLSSSYLA

SEQ ID NO: 606 - protein, 10 aa, Homo sapiens
QQYRTSPRGT

SEQ ID NO: 607 - protein, 15 aa, Homo sapiens
WYQQKPGQSPRLLIY

SEQ ID NO: 608 - protein, 183 aa, Homo sapiens
EVQLVESGGGLVQPGGSLRLSCAASGFTFSSYAMSWVRQAPGKGLEWVSSIRGSGGSTYYADSVKGRFTISRDNSKYTLYLQMNSLRAEDTAVYYCAKITGAVGGENWFDPWGQGTLVTVSSASTKGPSVFPLAPCSRSTSGGTAALGCLVKDYFPEPVTVSWNSGALTSGVHTFPAVLQSSG

SEQ ID NO: 609 - protein, 122 aa, Homo sapiens
EVQLVESGGGLVQPGGSLRLSCAASGFTFSSYAMSWVRQAPGKGLEWVSSIRGSGGSTYYADSVKGRFTISRDNSKYTLYLQMNSLRAEDTAVYYCAKITGAVGGENWFDPWGQGTLVTVSS

SEQ ID NO: 610 - protein, 5 aa, Homo sapiens
SYAMS

SEQ ID NO: 611 - protein, 17 aa, Homo sapiens
SIRGSGGSTYYADSVKG

SEQ ID NO: 612 - protein, 13 aa, Homo sapiens
ITGAVGGENWFDP

SEQ ID NO: 613 - protein, 30 aa, Homo sapiens
EVQLVESGGGLVQPGGSLRLSCAASGFTFS

SEQ ID NO: 614 - protein, 32 aa, Homo sapiens
RFTISRDNSKYTLYLQMNSLRAEDTAVYYCAK

SEQ ID NO: 615 - protein, 187 aa, Homo sapiens
DIQMTQSPSSLSASVGDRVTITCRASQSISSYLNWYQQKPGKAPKLLIYAASSLQSGVPSRFSGSGSGTDFTLTISSLQPEDFAIYYCQQTSRTPLTFGGGTKVEVKRTVAAPSVFIFPPSDEQLKSGTASVVCLLNNFYPREAKVQWKVDNALQSGNSQESVTEQDSKDSTYSLSSTLTLSKADYE

SEQ ID NO: 616 - protein, 107 aa, Homo sapiens
DIQMTQSPSSLSASVGDRVTITCRASQSISSYLNWYQQKPGKAPKLLIYAASSLQSGVPSRFSGSGSGTDFTLTISSLQPEDFAIYYCQQTSRTPLTFGGGTKVEVK

SEQ ID NO: 617 - protein, 9 aa, Homo sapiens
QQTSRTPLT

SEQ ID NO: 618 - protein, 32 aa, Homo sapiens
GVPSRFSGSGSGTDFTLTISSLQPEDFAIYYC

SEQ ID NO: 619 - protein, 10 aa, Homo sapiens
FGGGTKVEVK

SEQ ID NO: 620 - protein, 177 aa, Homo sapiens
EVRLVQSGGGLVKPGGSLRLSCAASGFTFSTAWVRWVRQAPGKGLECVGRIKSKNDGDRAEYAAPARGRFIISRDDAENILYLQMNNLKTEDTAFYYCTTDQGNSSAFYSADYWGQGTLVTVSSASPTSPKVFPLSLDSTPQDGNVVVACLVQGFFPQEPLSVTWSESGQNVTARNF

SEQ ID NO: 621 - protein, 124 aa, Homo sapiens
EVRLVQSGGGLVKPGGSLRLSCAASGFTFSTAWVRWVRQAPGKGLECVGRIKSKNDGDRAEYAAPARGRFIISRDDAENILYLQMNNLKTEDTAFYYCTTDQGNSSAFYSADYWGQGTLVTVSS

SEQ ID NO: 622 - protein, 5 aa, Homo sapiens
TAWVR

SEQ ID NO: 623 - protein, 19 aa, Homo sapiens
RIKSKNDGDRAEYAAPARG

SEQ ID NO: 624 - protein, 13 aa, Homo sapiens
DQGNSSAFYSADY

SEQ ID NO: 625 - protein, 30 aa, Homo sapiens
EVRLVQSGGGLVKPGGSLRLSCAASGFTFS

SEQ ID NO: 626 - protein, 14 aa, Homo sapiens
WVRQAPGKGLECVG

SEQ ID NO: 627 - protein, 32 aa, Homo sapiens
RFIISRDDAENILYLQMNNLKTEDTAFYYCTT

SEQ ID NO: 628 - protein, 187 aa, Homo sapiens
DIQMTQSPSAMSASVGDRVTITCRASQDINTFLTWFQQKPGKVPQRLIFAAYRLQSGVPSRFSGSGSGTEFTLTINSLQPEDVATYYCLHHKTYPYTFGQGTKLEIKRTVAAPSVFIFPPSDEQLKSGTASVVCLLNNFYPREAKVQWKVDNALQSGNSQESVTEQDSKDSTYSLSSTLTLSKADYE

SEQ ID NO: 629 - protein, 107 aa, Homo sapiens
DIQMTQSPSAMSASVGDRVTITCRASQDINTFLTWFQQKPGKVPQRLIFAAYRLQSGVPSRFSGSGSGTEFTLTINSLQPEDVATYYCLHHKTYPYTFGQGTKLEIK

SEQ ID NO: 630 - protein, 11 aa, Homo sapiens
RASQDINTFLT

SEQ ID NO: 631 - protein, 7 aa, Homo sapiens
AAYRLQS

SEQ ID NO: 632 - protein, 9 aa, Homo sapiens
LHHKTYPYT

SEQ ID NO: 633 - protein, 23 aa, Homo sapiens
DIQMTQSPSAMSASVGDRVTITC

SEQ ID NO: 634 - protein, 15 aa, Homo sapiens
WFQQKPGKVPQRLIF

SEQ ID NO: 635 - protein, 32 aa, Homo sapiens
GVPSRFSGSGSGTEFTLTINSLQPEDVATYYC

SEQ ID NO: 636 - protein, 179 aa, Homo sapiens
EVQLVQSGAEVKKPGESLKISCKGSGYRFTRYWIGWVRQMPGKGLEWMGIIYLGDSETRYSPSFQGQVTISADNSISTAYLQWSSLKASDTAMYYCARSSNWNYGDYWGQGTLVTVSSASTKGPSVFPLAPCSRSTSGGTAALGCLVKDYFPEPVTVSWNSGALTSGVHTFPAVLQSSG

SEQ ID NO: 637 - protein, 118 aa, Homo sapiens
EVQLVQSGAEVKKPGESLKISCKGSGYRFTRYWIGWVRQMPGKGLEWMGIIYLGDSETRYSPSFQGQVTISADNSISTAYLQWSSLKASDTAMYYCARSSNWNYGDYWGQGTLVTVSS

SEQ ID NO: 638 - protein, 5 aa, Homo sapiens
RYWIG

SEQ ID NO: 639 - protein, 17 aa, Homo sapiens
IIYLGDSETRYSPSFQG

SEQ ID NO: 640 - protein, 9 aa, Homo sapiens
SSNWNYGDY

SEQ ID NO: 641 - protein, 30 aa, Homo sapiens
EVQLVQSGAEVKKPGESLKISCKGSGYRFT

SEQ ID NO: 642 - protein, 32 aa, Homo sapiens
QVTISADNSISTAYLQWSSLKASDTAMYYCAR

SEQ ID NO: 643 - protein, 187 aa, Homo sapiens
DIQMTQSPSTLSASVGDRVTITCRASQSITSWLAWYQQKSGKAPKLLIYDASSLESGVPSRFSGSGSGTEFTLTISSLQPDDFATYYCQQYNSYPWTFGQGTKVEIKRTVAAPSVFIFPPSDEQLKSGTASVVCLLNNFYPREAKVQWKVDNALQSGNSQESVTEQDSKDSTYSLSSTLTLSKADYE

SEQ ID NO: 644 - protein, 107 aa, Homo sapiens
DIQMTQSPSTLSASVGDRVTITCRASQSITSWLAWYQQKSGKAPKLLIYDASSLESGVPSRFSGSGSGTEFTLTISSLQPDDFATYYCQQYNSYPWTFGQGTKVEIK

SEQ ID NO: 645 - protein, 11 aa, Homo sapiens
RASQSITSWLA

SEQ ID NO: 646 - protein, 9 aa, Homo sapiens
QQYNSYPWT

SEQ ID NO: 647 - protein, 15 aa, Homo sapiens
WYQQKSGKAPKLLIY

SEQ ID NO: 648 - protein, 185 aa, Homo sapiens
QVQLQESGPGLVKPSETLSLTCTVSGGSISSDYWSWIRQPPGKGLEWIGYMYYSGSTNYNPSLKSRVTISVDTSKNQFSLKLSSVTAADTAVYYCARWDRGSRPHYYYYGMDVWGQGTTVTVSSASTKGPSVFPLAPSSKSTSGGTAALGCLVKDYFPEPVTVSWNSGALTSGVHTFPAVLQSSG

SEQ ID NO: 649 - protein, 124 aa, Homo sapiens
QVQLQESGPGLVKPSETLSLTCTVSGGSISSDYWSWIRQPPGKGLEWIGYMYYSGSTNYNPSLKSRVTISVDTSKNQFSLKLSSVTAADTAVYYCARWDRGSRPHYYYYGMDVWGQGTTVTVSS

SEQ ID NO: 650 - protein, 5 aa, Homo sapiens
SDYWS

SEQ ID NO: 651 - protein, 16 aa, Homo sapiens
WDRGSRPHYYYYGMDV

SEQ ID NO: 652 - protein, 191 aa, Homo sapiens
DIVMTQSPLSLPVTPGEPASISCRSSQSLLHSNGYNYLDWYLQKPGQSPQLLIYLGSNRASGVPDRFSGSASGTDFTLKISRVEAEDVGVYYCMQALQAFTFGPGTKVDIKRTVAAPSVFIFPPSDEQLKSGTASVVCLLNNFYPREAKVQWKVDNALQSGNSQESVTEQDSKDSTYSLSSTLTLSKADYE

SEQ ID NO: 653 - protein, 111 aa, Homo sapiens
DIVMTQSPLSLPVTPGEPASISCRSSQSLLHSNGYNYLDWYLQKPGQSPQLLIYLGSNRASGVPDRFSGSASGTDFTLKISRVEAEDVGVYYCMQALQAFTFGPGTKVDIK

SEQ ID NO: 654 - protein, 8 aa, Homo sapiens
MQALQAFT

SEQ ID NO: 655 - protein, 32 aa, Homo sapiens
GVPDRFSGSASGTDFTLKISRVEAEDVGVYYC

SEQ ID NO: 656 - protein, 214 aa, Homo sapiens
EVQLVQSGAEVKKPGESLKISCKGSAYTFTTYWIGWVRQMPGKGLEWMGIIYPGDSDTRYSPSFQGQVTISADKSISTAYLQWSSLKASDTAMYYCARLLLVAGPFDYWGQGTLVTVSSASTKGPSVFPLAPSSKSTSGGTAALGCLVKDYFPEPVTVSWNSGALTSGVHTFPAVLQSSGLYSLSSVVTVPSSSLGTQTYICNVNHKPSNTKVD

SEQ ID NO: 657 - protein, 119 aa, Homo sapiens
EVQLVQSGAEVKKPGESLKISCKGSAYTFTTYWIGWVRQMPGKGLEWMGIIYPGDSDTRYSPSFQGQVTISADKSISTAYLQWSSLKASDTAMYYCARLLLVAGPFDYWGQGTLVTVSS

SEQ ID NO: 658 - protein, 5 aa, Homo sapiens
TYWIG

SEQ ID NO: 659 - protein, 10 aa, Homo sapiens
LLLVAGPFDY

SEQ ID NO: 660 - protein, 30 aa, Homo sapiens
EVQLVQSGAEVKKPGESLKISCKGSAYTFT

SEQ ID NO: 661 - protein, 32 aa, Homo sapiens
QVTISADKSISTAYLQWSSLKASDTAMYYCAR

SEQ ID NO: 662 - protein, 152 aa, Homo sapiens
DIQMTQSPSTLSASVGDRVTITCRASQSISSWLAWYQQKPGKAPNLLIYDASSLESGVPSRFSGSGSGTEFTLTISSLQPDDFATYYCQQYNSYPWTFGQGTKVEIKRTVAAPSVFIFPPSDEQLKSGTASVVCLLNNFYPREAKVQWKVDN

SEQ ID NO: 663 - protein, 107 aa, Homo sapiens
DIQMTQSPSTLSASVGDRVTITCRASQSISSWLAWYQQKPGKAPNLLIYDASSLESGVPSRFSGSGSGTEFTLTISSLQPDDFATYYCQQYNSYPWTFGQGTKVEIK

SEQ ID NO: 664 - protein, 15 aa, Homo sapiens
WYQQKPGKAPNLLIY

SEQ ID NO: 665 - protein, 184 aa, Homo sapiens
QVQLLQSGAEVKKPGASVKVSCKASGYTFTGYYMHWVRQAPGQGLEWMGRINPNSGGTNYAQKFQGRVTMTRDTSISTAYMELSRLTSDDTAVYYCATKTGIDRYYYYYMDVWGKGTTVTVSSASTKGPSVFPLAPSSKSTSGGTAALGCLVKDYFPEPVTVSWNSGALTSGVHTFPAVLQSSG

SEQ ID NO: 666 - protein, 123 aa, Homo sapiens
QVQLLQSGAEVKKPGASVKVSCKASGYTFTGYYMHWVRQAPGQGLEWMGRINPNSGGTNYAQKFQGRVTMTRDTSISTAYMELSRLTSDDTAVYYCATKTGIDRYYYYYMDVWGKGTTVTVSS

SEQ ID NO: 667 - protein, 14 aa, Homo sapiens
KTGIDRYYYYYMDV

SEQ ID NO: 668 - protein, 30 aa, Homo sapiens
QVQLLQSGAEVKKPGASVKVSCKASGYTFT

SEQ ID NO: 669 - protein, 32 aa, Homo sapiens
RVTMTRDTSISTAYMELSRLTSDDTAVYYCAT

SEQ ID NO: 670 - protein, 11 aa, Homo sapiens
WGKGTTVTVSS

SEQ ID NO: 671 - protein, 181 aa, Homo sapiens
QSVLTQPPSVSEAPGQRVTISCTGSSSNIGAGYDVHWYQQLPGTAPKLLIYGNINRPSGVPDRFSGSKSGTSASLAITGLQAEDEADYYCQSYDNSLNGSVFGGGTKLTVLRQPKAAPSVTLFPPSSEELQANKATLVCLISDFYPGAVTVAWKADSSPVKAGVETTTPSKQSNNKYAASS

SEQ ID NO: 672 - protein, 111 aa, Homo sapiens
QSVLTQPPSVSEAPGQRVTISCTGSSSNIGAGYDVHWYQQLPGTAPKLLIYGNINRPSGVPDRFSGSKSGTSASLAITGLQAEDEADYYCQSYDNSLNGSVFGGGTKLTVL

SEQ ID NO: 673 - protein, 14 aa, Homo sapiens
TGSSSNIGAGYDVH

SEQ ID NO: 674 - protein, 7 aa, Homo sapiens
GNINRPS

SEQ ID NO: 675 - protein, 11 aa, Homo sapiens
QSYDNSLNGSV

SEQ ID NO: 676 - protein, 22 aa, Homo sapiens
QSVLTQPPSVSEAPGQRVTISC

SEQ ID NO: 677 - protein, 171 aa, Homo sapiens
QVQLQESGPGLVKPSETLSLTCSVSGGSISDYYWSWIRQPPGKGLEWIGYIYNSGSTNYNPSLKSRVTISADPSKNQFSLKLSSVTAADTAVYYCARPHGGDYAFDIWGQGTMVTVSSASPTSPKVFPLSLDSTPQDGNVVVACLVQGFFPQEPLSVTWSESGQNVTARNF

SEQ ID NO: 678 - protein, 118 aa, Homo sapiens
QVQLQESGPGLVKPSETLSLTCSVSGGSISDYYWSWIRQPPGKGLEWIGYIYNSGSTNYNPSLKSRVTISADPSKNQFSLKLSSVTAADTAVYYCARPHGGDYAFDIWGQGTMVTVSS

SEQ ID NO: 679 - protein, 5 aa, Homo sapiens
DYYWS

SEQ ID NO: 680 - protein, 16 aa, Homo sapiens
YIYNSGSTNYNPSLKS

SEQ ID NO: 681 - protein, 10 aa, Homo sapiens
PHGGDYAFDI

SEQ ID NO: 682 - protein, 30 aa, Homo sapiens
QVQLQESGPGLVKPSETLSLTCSVSGGSIS

SEQ ID NO: 683 - protein, 32 aa, Homo sapiens
RVTISADPSKNQFSLKLSSVTAADTAVYYCAR

SEQ ID NO: 684 - protein, 188 aa, Homo sapiens
EIVLTQSPGTLSLSPGERATLSCRASQSVSSNFLAWYQQKPGQPPRLLIYGASVRATGIPDRFSGSGSGTDFTLTITRLEPEDFAVYYCQQYGSLPRTFGQGTKVEIKRTVAAPSVFIFPPSDEQLKSGTASVVCLLNNFYPREAKVQWKVDNALQSGNSQESVTEQDSKDSTYSLSSTLTLSKADYE

SEQ ID NO: 685 - protein, 108 aa, Homo sapiens
EIVLTQSPGTLSLSPGERATLSCRASQSVSSNFLAWYQQKPGQPPRLLIYGASVRATGIPDRFSGSGSGTDFTLTITRLEPEDFAVYYCQQYGSLPRTFGQGTKVEIK

SEQ ID NO: 686 - protein, 12 aa, Homo sapiens
RASQSVSSNFLA

SEQ ID NO: 687 - protein, 7 aa, Homo sapiens
GASVRAT

SEQ ID NO: 688 - protein, 9 aa, Homo sapiens
QQYGSLPRT

SEQ ID NO: 689 - protein, 15 aa, Homo sapiens
WYQQKPGQPPRLLIY

SEQ ID NO: 690 - protein, 32 aa, Homo sapiens
GIPDRFSGSGSGTDFTLTITRLEPEDFAVYYC

SEQ ID NO: 691 - protein, 184 aa, Homo sapiens
QVQLVQSGAEVMKPGSSVKVSCKASGGTFSSYSITWVRQAPGQGLEWMGRIIPILGIANYAQKFQGRVTITADKSTSTAYMELSSLRSEDTAVYYCARGYSGSPSNLDGMDVWGQGTTVTVSSASTKGPSVFPLAPSSKSTSGGTAALGCLVKDYFPEPVTVSWNSGALTSGVHTFPAVLQSSG

SEQ ID NO: 692 - protein, 123 aa, Homo sapiens
QVQLVQSGAEVMKPGSSVKVSCKASGGTFSSYSITWVRQAPGQGLEWMGRIIPILGIANYAQKFQGRVTITADKSTSTAYMELSSLRSEDTAVYYCARGYSGSPSNLDGMDVWGQGTTVTVSS

SEQ ID NO: 693 - protein, 5 aa, Homo sapiens
SYSIT

SEQ ID NO: 694 - protein, 14 aa, Homo sapiens
GYSGSPSNLDGMDV

SEQ ID NO: 695 - protein, 30 aa, Homo sapiens
QVQLVQSGAEVMKPGSSVKVSCKASGGTFS

SEQ ID NO: 696 - protein, 187 aa, Homo sapiens
IQMTQSPSTLSASVGDRVTITCRASQSISSWLAWYQQKPGKAPKLLIYDASSLQSGVPSRFSGSGSGTEFTLTISSLQPDDFATYYCQQYNSYSPITFGQGTRLEIKRTVAAPSVFIFPPSDEQLKSGTASVVCLLNNFYPREAKVQWKVDNALQSGNSQESVTEQDSKDSTYSLSSTLTLSKADYE

SEQ ID NO: 697 - protein, 107 aa, Homo sapiens
IQMTQSPSTLSASVGDRVTITCRASQSISSWLAWYQQKPGKAPKLLIYDASSLQSGVPSRFSGSGSGTEFTLTISSLQPDDFATYYCQQYNSYSPITFGQGTRLEIK

SEQ ID NO: 698 - protein, 7 aa, Homo sapiens
DASSLQS

SEQ ID NO: 699 - protein, 10 aa, Homo sapiens
QQYNSYSPIT

SEQ ID NO: 700 - protein, 22 aa, Homo sapiens
IQMTQSPSTLSASVGDRVTITC

SEQ ID NO: 701 - protein, 10 aa, Homo sapiens
FGQGTRLEIK

SEQ ID NO: 702 - protein, 190 aa, Homo sapiens
QLQLQESGPGLVKPSETLSLTCTVSGGSISSSSYYWGWIRQPPGKGLEWIGSIYYSGSTYYNPSLKSRFTISVDTSKNQFSLKLSSVTAADTAVYYCAAYQRKLGYCRGNSCFSCFDPWGQGTLVTVSSASTKGPSVFPLAPSSKSTSGGTAALGCLVKDYFPEPVTVSWNSGALTSGVHTFPAVLQSSG

SEQ ID NO: 703 - protein, 129 aa, Homo sapiens
QLQLQESGPGLVKPSETLSLTCTVSGGSISSSSYYWGWIRQPPGKGLEWIGSIYYSGSTYYNPSLKSRFTISVDTSKNQFSLKLSSVTAADTAVYYCAAYQRKLGYCRGNSCFSCFDPWGQGTLVTVSS

SEQ ID NO: 704 - protein, 19 aa, Homo sapiens
YQRKLGYCRGNSCFSCFDP

SEQ ID NO: 705 - protein, 32 aa, Homo sapiens
RFTISVDTSKNQFSLKLSSVTAADTAVYYCAA

SEQ ID NO: 706 - protein, 188 aa, Homo sapiens
SYELTQPPSVSVSPGQTASITCSGDKLGDKYACWYQQKPGQSPVLVIYQDTKRPSGIPERFSGSNSGNTATLTISGTQAMDEADYYCQAWDSSTVLFGGGTKLTVLGQPKAAPSVTLFPPSSEELQANKATLVCLISDFYPGAVTVAWKADSSPVKAGVETTTPSKQSNNKYAASSYLSLTPEQWKSH

SEQ ID NO: 707 - protein, 106 aa, Homo sapiens
SYELTQPPSVSVSPGQTASITCSGDKLGDKYACWYQQKPGQSPVLVIYQDTKRPSGIPERFSGSNSGNTATLTISGTQAMDEADYYCQAWDSSTVLFGGGTKLTVL

SEQ ID NO: 708 - protein, 9 aa, Homo sapiens
QAWDSSTVL

SEQ ID NO: 709 - protein, 183 aa, Homo sapiens
EVHLVQSGAEVKQPGESLKISCKGSGYNFATYWIAWVRQMPGKGLEWMGIIYPGDSDTRYSPSFQGQVIISADKSIGTAFLQWSSLKASDTAMYYCARRGYSSSNYRVDEYYYYGMDVWGQGTTVTVSSASPTSPKVFPLSLCSTQPDGNVVIACLVQGFFPQEPLSVTWSESGQGVTARNFP

SEQ ID NO: 710 - protein, 129 aa, Homo sapiens
EVHLVQSGAEVKQPGESLKISCKGSGYNFATYWIAWVRQMPGKGLEWMGIIYPGDSDTRYSPSFQGQVIISADKSIGTAFLQWSSLKASDTAMYYCARRGYSSSNYRVDEYYYYGMDVWGQGTTVTVSS

SEQ ID NO: 711 - protein, 20 aa, Homo sapiens
RGYSSSNYRVDEYYYYGMDV

SEQ ID NO: 712 - protein, 30 aa, Homo sapiens
EVHLVQSGAEVKQPGESLKISCKGSGYNFA

SEQ ID NO: 713 - protein, 32 aa, Homo sapiens
QVIISADKSIGTAFLQWSSLKASDTAMYYCAR

SEQ ID NO: 714 - protein, 186 aa, Homo sapiens
QSVLTQPPSMSGAPGQRVTISCTGSSSNIGAGYDVHWYQQLPGAAPKLLIYGDTSRPSGVPDRFSGSKSDTSASLAITGLQAEDEADYYCQSFDRSLSGLVIFGGGTRLTVLGQPKAAPSVTLFPPSSEELQANKATLVCLISDFYPGAVTVAWKADSSPVKAGVETTTPSKQSNNKYAASSDRKS

SEQ ID NO: 715 - protein, 112 aa, Homo sapiens
QSVLTQPPSMSGAPGQRVTISCTGSSSNIGAGYDVHWYQQLPGAAPKLLIYGDTSRPSGVPDRFSGSKSDTSASLAITGLQAEDEADYYCQSFDRSLSGLVIFGGGTRLTVL

SEQ ID NO: 716 - protein, 7 aa, Homo sapiens
GDTSRPS

SEQ ID NO: 717 - protein, 12 aa, Homo sapiens
QSFDRSLSGLVI

SEQ ID NO: 718 - protein, 22 aa, Homo sapiens
QSVLTQPPSMSGAPGQRVTISC

SEQ ID NO: 719 - protein, 15 aa, Homo sapiens
WYQQLPGAAPKLLIY

SEQ ID NO: 720 - protein, 32 aa, Homo sapiens
GVPDRFSGSKSDTSASLAITGLQAEDEADYYC

SEQ ID NO: 721 - protein, 10 aa, Homo sapiens
FGGGTRLTVL

SEQ ID NO: 722 - protein, 184 aa, Homo sapiens
QVQLVQSGAEVKKPGASVKVSCKASGYTFTGYYMHWVRQAPGQGLEWMGRINPNSGDTNYAQKFQGRVTMTRDTSISTAYMELSRLRSDDTAVYYCARLGKGMAAARTVFDSWGQGTLVTVSSASTKGPSVFPLAPSSKSTSGGTAALGCLVKDYFPEPVTVSWNSGALTSGVHTFPAVLQSSG

SEQ ID NO: 723 - protein, 123 aa, Homo sapiens
QVQLVQSGAEVKKPGASVKVSCKASGYTFTGYYMHWVRQAPGQGLEWMGRINPNSGDTNYAQKFQGRVTMTRDTSISTAYMELSRLRSDDTAVYYCARLGKGMAAARTVFDSWGQGTLVTVSS

SEQ ID NO: 724 - protein, 17 aa, Homo sapiens
RINPNSGDTNYAQKFQG

SEQ ID NO: 725 - protein, 14 aa, Homo sapiens
LGKGMAAARTVFDS

SEQ ID NO: 726 - protein, 187 aa, Homo sapiens
EVVLTQSPGTLSLSPGERATLSCRASQSVSSSYLAWYQQKPGQAPRLVIYGASSRATGIPDRFSGSGSGTDFTLTISRLEPEDFAVYYCQQFGSSPTFGRGTRLEIKRTVAAPSVFIFPPSDEQLKSGTASVVCLLNNFYPREAKVQWKVDNALQSGNSQESVTEQDSKDSTYSLSSTLTLSKADYE

SEQ ID NO: 727 - protein, 107 aa, Homo sapiens
EVVLTQSPGTLSLSPGERATLSCRASQSVSSSYLAWYQQKPGQAPRLVIYGASSRATGIPDRFSGSGSGTDFTLTISRLEPEDFAVYYCQQFGSSPTFGRGTRLEIK

SEQ ID NO: 728 - protein, 8 aa, Homo sapiens
QQFGSSPT

SEQ ID NO: 729 - protein, 23 aa, Homo sapiens
EVVLTQSPGTLSLSPGERATLSC

SEQ ID NO: 730 - protein, 15 aa, Homo sapiens
WYQQKPGQAPRLVIY

SEQ ID NO: 731 - protein, 10 aa, Homo sapiens
FGRGTRLEIK

SEQ ID NO: 732 - protein, 183 aa, Homo sapiens
QVHLVQSGAEVKKPGASVKVSCKASGYTFTGYYMNWVRQAPGQGLEWMGRINPNSGGTNYAQKFQGRVTMTRDTSISTAYMELSRLRSDDAAVYYCARAERYSSSWYNLYYWGQGTLVTVSSASTKGPSVFPLAPSSKSTSGGTAALGCLVKDYFPEPVTVSWNSGALTSGVHTFPAVLQSSG

SEQ ID NO: 733 - protein, 122 aa, Homo sapiens
QVHLVQSGAEVKKPGASVKVSCKASGYTFTGYYMNWVRQAPGQGLEWMGRINPNSGGTNYAQKFQGRVTMTRDTSISTAYMELSRLRSDDAAVYYCARAERYSSSWYNLYYWGQGTLVTVSS

SEQ ID NO: 734 - protein, 5 aa, Homo sapiens
GYYMN

SEQ ID NO: 735 - protein, 13 aa, Homo sapiens
AERYSSSWYNLYY

SEQ ID NO: 736 - protein, 30 aa, Homo sapiens
QVHLVQSGAEVKKPGASVKVSCKASGYTFT

SEQ ID NO: 737 - protein, 32 aa, Homo sapiens
RVTMTRDTSISTAYMELSRLRSDDAAVYYCAR

SEQ ID NO: 738 - protein, 192 aa, Homo sapiens
QSVLTQPPSASGTPGQRVTISCSGSSSNIGSNTVNWYQQLPGTAPKLLIYSNNQRPSGVPDRFSGSKSGTSASLAISGLQSEDEADYYCAAWDDSLNGVVFGGGTKLTVLGQPKAAPSVTLFPPSSEELQANKATLVCLISDFYPGAVTVAWKADSSPVKAGVETTTPSKQSNNKYAASSYLSLTPEQWKSH

SEQ ID NO: 739 - protein, 110 aa, Homo sapiens
QSVLTQPPSASGTPGQRVTISCSGSSSNIGSNTVNWYQQLPGTAPKLLIYSNNQRPSGVPDRFSGSKSGTSASLAISGLQSEDEADYYCAAWDDSLNGVVFGGGTKLTVL

SEQ ID NO: 740 - protein, 13 aa, Homo sapiens
SGSSSNIGSNTVN

SEQ ID NO: 741 - protein, 11 aa, Homo sapiens
AAWDDSLNGVV

SEQ ID NO: 742 - protein, 213 aa, Homo sapiens
EVQLVQSGAEVKKPGESLKISCKGSRYSFTRYWIAWVRQMPGKGLEWMGIIYPGDSDTRYSPSFQGPVTISADKSISTAYLQWSSLKASDTAIYYCARLPNSNYVDYWGQGTLVTVSSASTKGPSVFPLAPSSKSTSGGTAALGCLVKDYFPEPVTVSWNSGALTSGVHTFPAVLQSSGLYSLSSVVTVPSSSLGTQTYICNVNHKPSNTKVD

SEQ ID NO: 743 - protein, 118 aa, Homo sapiens
EVQLVQSGAEVKKPGESLKISCKGSRYSFTRYWIAWVRQMPGKGLEWMGIIYPGDSDTRYSPSFQGPVTISADKSISTAYLQWSSLKASDTAIYYCARLPNSNYVDYWGQGTLVTVSS

SEQ ID NO: 744 - protein, 5 aa, Homo sapiens
RYWIA

SEQ ID NO: 745 - protein, 9 aa, Homo sapiens
LPNSNYVDY

SEQ ID NO: 746 - protein, 30 aa, Homo sapiens
EVQLVQSGAEVKKPGESLKISCKGSRYSFT

SEQ ID NO: 747 - protein, 32 aa, Homo sapiens
PVTISADKSISTAYLQWSSLKASDTAIYYCAR

SEQ ID NO: 748 - protein, 187 aa, Homo sapiens
DIQMTQSPSTLSASVGDRVTITCRASQSISSWLAWYQQKPGKAPKLLIYDASSLESGVPSRFSGSGSGTEFTLTISSLQPDDFATYYCQQYNIYPYTFGQGTKLDIKRTVAAPSVFIFPPSDEQLKSGTASVVCLLNNFYPREAKVQWKVDNALQSGNSQESVTEQDSKDSTYSLSSTLTLSKADYE

SEQ ID NO: 749 - protein, 107 aa, Homo sapiens
DIQMTQSPSTLSASVGDRVTITCRASQSISSWLAWYQQKPGKAPKLLIYDASSLESGVPSRFSGSGSGTEFTLTISSLQPDDFATYYCQQYNIYPYTFGQGTKLDIK

SEQ ID NO: 750 - protein, 9 aa, Homo sapiens
QQYNIYPYT

SEQ ID NO: 751 - protein, 10 aa, Homo sapiens
FGQGTKLDIK

SEQ ID NO: 752 - protein, 220 aa, Homo sapiens
QVQLVESGGGVVQPGGSVRLSCAASGFDFTNNGMYWVRQAPGKGLEWVAFIRYDGNKQDYADSVKGRFTISRDNSKNTLYLQMSSLRPEDTAVYYCAKGVYTENYGWGQGTLVTVSSGTTVTVSSASTKGPSVFPLAPCSRSTSESTAALGCLVKDYFPEPVTVSWNSGALTSGVHTFPAVLQSSGLYSLSSVVTVPSSNFGTQTYTCNVDHKPSNTKVD

SEQ ID NO: 753 - protein, 117 aa, Homo sapiens
QVQLVESGGGVVQPGGSVRLSCAASGFDFTNNGMYWVRQAPGKGLEWVAFIRYDGNKQDYADSVKGRFTISRDNSKNTLYLQMSSLRPEDTAVYYCAKGVYTENYGWGQGTLVTVSS

SEQ ID NO: 754 - protein, 5 aa, Homo sapiens
NNGMY

SEQ ID NO: 755 - protein, 17 aa, Homo sapiens
FIRYDGNKQDYADSVKG

SEQ ID NO: 756 - protein, 8 aa, Homo sapiens
GVYTENYG

SEQ ID NO: 757 - protein, 30 aa, Homo sapiens
QVQLVESGGGVVQPGGSVRLSCAASGFDFT

SEQ ID NO: 758 - protein, 32 aa, Homo sapiens
RFTISRDNSKNTLYLQMSSLRPEDTAVYYCAK

SEQ ID NO: 759 - protein, 189 aa, Homo sapiens
EIVLTQSPGTLSLSPGERATLSCRASQTVTSRYLAWYQQKPGQAPRLLIYGASTRATGIPDRFSGSGSGTDFTLTISRLEPEDFAVYYCQQYGNSPPYTFGQGTKLEIKRTVAAPSVFIFPPSDEQLKSGTASVVCLLNNFYPREAKVQWKVDNALQSGNSQESVTEQDSKDSTYSLSSTLTLSKADYE

SEQ ID NO: 760 - protein, 109 aa, Homo sapiens
EIVLTQSPGTLSLSPGERATLSCRASQTVTSRYLAWYQQKPGQAPRLLIYGASTRATGIPDRFSGSGSGTDFTLTISRLEPEDFAVYYCQQYGNSPPYTFGQGTKLEIK

SEQ ID NO: 761 - protein, 12 aa, Homo sapiens
RASQTVTSRYLA

SEQ ID NO: 762 - protein, 10 aa, Homo sapiens
QQYGNSPPYT

SEQ ID NO: 763 - protein, 210 aa, Homo sapiens
QVQLVESGGGVVQPGRSLRLSCAASGFTFSTYGMHWVRQAPGKGLEWVAVISYDGSNKYYADSVKGRFTISRDNSKNTLYLQMNSLRAEDTAVYYCAKQQGTYCSGGNCYSGYFDYWGQGTLVTVSSASTKGPSVFPLAPSSKSTSGGTAALGCLVKDYFPEPVTVSWNSGALTSGVHTFPAVLQSSGLYSLSSVVTVPSSSLGTQTYIC

SEQ ID NO: 764 - protein, 127 aa, Homo sapiens
QVQLVESGGGVVQPGRSLRLSCAASGFTFSTYGMHWVRQAPGKGLEWVAVISYDGSNKYYADSVKGRFTISRDNSKNTLYLQMNSLRAEDTAVYYCAKQQGTYCSGGNCYSGYFDYWGQGTLVTVSS

SEQ ID NO: 765 - protein, 5 aa, Homo sapiens
TYGMH

SEQ ID NO: 766 - protein, 18 aa, Homo sapiens
QQGTYCSGGNCYSGYFDY

SEQ ID NO: 767 - protein, 187 aa, Homo sapiens
DIQMTQSPSSLSASVGDRVTITCQASQDISNYLNWYQQKPGKAPKLLIYDASNLETGVPSRFSGSGSGTDFSFSISSLQPEDIATYYCQQYDNVPLTFGGGTKVEIKRTVAAPSVFIFPPSDEQLKSGTASVVCLLNNFYPREAKVQWKVDNALQSGNSQESVTEQDSKDSTYSLSSTLTLSKADYE

SEQ ID NO: 768 - protein, 107 aa, Homo sapiens
DIQMTQSPSSLSASVGDRVTITCQASQDISNYLNWYQQKPGKAPKLLIYDASNLETGVPSRFSGSGSGTDFSFSISSLQPEDIATYYCQQYDNVPLTFGGGTKVEIK

SEQ ID NO: 769 - protein, 11 aa, Homo sapiens
QASQDISNYLN

SEQ ID NO: 770 - protein, 7 aa, Homo sapiens
DASNLET

SEQ ID NO: 771 - protein, 9 aa, Homo sapiens
QQYDNVPLT

SEQ ID NO: 772 - protein, 32 aa, Homo sapiens
GVPSRFSGSGSGTDFSFSISSLQPEDIATYYC

SEQ ID NO: 773 - protein, 201 aa, Homo sapiens
QVQLVQSGAEVKKPGASVKVSCTASGYTVTSYGISWVRQAPGQGLEWMGWISTYNGNTNYAQKLQGRVTMTTDTSTSTAYMELRSLRSDDTAVYYCAREYSYGYRLAYFDYWGQGTLVTVSSGSASAPTLFPLVSCENSPSDTSSVAVGCLAQDFLPDSITFSWKYKNNSDISSTRGFPSVLRGGKYAATSQVLLPSKDVM

SEQ ID NO: 774 - protein, 122 aa, Homo sapiens
QVQLVQSGAEVKKPGASVKVSCTASGYTVTSYGISWVRQAPGQGLEWMGWISTYNGNTNYAQKLQGRVTMTTDTSTSTAYMELRSLRSDDTAVYYCAREYSYGYRLAYFDYWGQGTLVTVSS

SEQ ID NO: 775 - protein, 5 aa, Homo sapiens
SYGIS

SEQ ID NO: 776 - protein, 17 aa, Homo sapiens
WISTYNGNTNYAQKLQG

SEQ ID NO: 777 - protein, 13 aa, Homo sapiens
EYSYGYRLAYFDY

SEQ ID NO: 778 - protein, 30 aa, Homo sapiens
QVQLVQSGAEVKKPGASVKVSCTASGYTVT

SEQ ID NO: 779 - protein, 32 aa, Homo sapiens
RVTMTTDTSTSTAYMELRSLRSDDTAVYYCAR

SEQ ID NO: 780 - protein, 193 aa, Homo sapiens
DIVMTQSPDSLAVSLGERATINCKSSQSVLNSSNNKNYLAWYQQKPGQPPKLLIYWASTRESGVPDRFSGSGSGTDFTLTISSLQAEDVAVYYCQQYYSTPQTFGQGTKVEIKRTVAAPSVFIFPPSDEQLKSGTASVVCLLNNFYPREAKVQWKVDNALQSGNSQESVTEQDSKDSTYSLSSTLTLSKADYE

SEQ ID NO: 781 - protein, 113 aa, Homo sapiens
DIVMTQSPDSLAVSLGERATINCKSSQSVLNSSNNKNYLAWYQQKPGQPPKLLIYWASTRESGVPDRFSGSGSGTDFTLTISSLQAEDVAVYYCQQYYSTPQTFGQGTKVEIK

SEQ ID NO: 782 - protein, 17 aa, Homo sapiens
KSSQSVLNSSNNKNYLA

SEQ ID NO: 783 - protein, 9 aa, Homo sapiens
QQYYSTPQT

SEQ ID NO: 784 - protein, 183 aa, Homo sapiens
EVQLVESGGGLVQPGGSLRISCSASGFTFSRYAMHWVRQAPGKGLEYVSAIRSNGGSTYYADSVRGRFTISRDNSRNTLYLQMSSLRAEDTAVYYCVIINNLAAAGTRFDYWGQGTLVTVSSASTKGPSVFPLAPSSKSTSGGTAALGCLVKDYFPEPVTVSWNSGALTSGVHTFPAVLQSSG

SEQ ID NO: 785 - protein, 122 aa, Homo sapiens
EVQLVESGGGLVQPGGSLRISCSASGFTFSRYAMHWVRQAPGKGLEYVSAIRSNGGSTYYADSVRGRFTISRDNSRNTLYLQMSSLRAEDTAVYYCVIINNLAAAGTRFDYWGQGTLVTVSS

SEQ ID NO: 786 - protein, 5 aa, Homo sapiens
RYAMH

SEQ ID NO: 787 - protein, 17 aa, Homo sapiens
AIRSNGGSTYYADSVRG

SEQ ID NO: 788 - protein, 13 aa, Homo sapiens
INNLAAAGTRFDY

SEQ ID NO: 789 - protein, 30 aa, Homo sapiens
EVQLVESGGGLVQPGGSLRISCSASGFTFS

SEQ ID NO: 790 - protein, 14 aa, Homo sapiens
WVRQAPGKGLEYVS

SEQ ID NO: 791 - protein, 32 aa, Homo sapiens
RFTISRDNSRNTLYLQMSSLRAEDTAVYYCVI

SEQ ID NO: 792 - protein, 193 aa, Homo sapiens
DIVMTQSPDSLAVSLGERATINCKSSQSVLYSSNNKNFLTWYQQKPGQPPKLLIYWASTRESGVPDRFSGSGSGTDFTLTISSLQAEDVAVYYCQQYYTTPWTFGQGTKVEIKRTVAAPSVFIFPPSDEQLKSGTASVVCLLNNFYPREAKVQWKVDNALQSGNSQESVTEQDSKDSTYSLSSTLTLSKADYE

SEQ ID NO: 793 - protein, 113 aa, Homo sapiens
DIVMTQSPDSLAVSLGERATINCKSSQSVLYSSNNKNFLTWYQQKPGQPPKLLIYWASTRESGVPDRFSGSGSGTDFTLTISSLQAEDVAVYYCQQYYTTPWTFGQGTKVEIK

SEQ ID NO: 794 - protein, 17 aa, Homo sapiens
KSSQSVLYSSNNKNFLT

SEQ ID NO: 795 - protein, 9 aa, Homo sapiens
QQYYTTPWT

SEQ ID NO: 796 - protein, 213 aa, Homo sapiens
QVQLQQWGAGLLKPSETLSLTCAVYGGSFSGYFWSWIRQPPGKGLEWIGEINHSGSTNYNPSLKSRVTISVDTSKNQFSLKLSSVTAADTAVYYCARAPYYDFLREGNWFDPWGQGTLVTVSSASTKGPSVFPLAPSSKSTSGGTAALGCLVKDYFPEPVTVSWNSGALTSGVHTFPAVLQSSGLYSLSSVVTVPSSSLGTQTYICNVNHKPS

SEQ ID NO: 797 - protein, 123 aa, Homo sapiens
QVQLQQWGAGLLKPSETLSLTCAVYGGSFSGYFWSWIRQPPGKGLEWIGEINHSGSTNYNPSLKSRVTISVDTSKNQFSLKLSSVTAADTAVYYCARAPYYDFLREGNWFDPWGQGTLVTVSS

SEQ ID NO: 798 - protein, 5 aa, Homo sapiens
GYFWS

SEQ ID NO: 799 - protein, 16 aa, Homo sapiens
EINHSGSTNYNPSLKS

SEQ ID NO: 800 - protein, 15 aa, Homo sapiens
APYYDFLREGNWFDP

SEQ ID NO: 801 - protein, 30 aa, Homo sapiens
QVQLQQWGAGLLKPSETLSLTCAVYGGSFS

SEQ ID NO: 802 - protein, 193 aa, Homo sapiens
DIVMTQSPDSLAVSLGERATINCNSSQSVLYSSINKNYLAWYQQKPAQPPKVLIYWASTRESGVPDRFSGSGSGTDFTLTISSLQAEDVAVYYCQQYYRTPWTFGQGTKVEIKRTVAAPSVFIFPPSDEQLKSGTASVVCLLNNFYPREAKVQWKVDNALQSGNSQESVTEQDSKDSTYSLSSTLTLSKADYE

SEQ ID NO: 803 - protein, 113 aa, Homo sapiens
DIVMTQSPDSLAVSLGERATINCNSSQSVLYSSINKNYLAWYQQKPAQPPKVLIYWASTRESGVPDRFSGSGSGTDFTLTISSLQAEDVAVYYCQQYYRTPWTFGQGTKVEIK

SEQ ID NO: 804 - protein, 17 aa, Homo sapiens
NSSQSVLYSSINKNYLA

SEQ ID NO: 805 - protein, 9 aa, Homo sapiens
QQYYRTPWT

SEQ ID NO: 806 - protein, 15 aa, Homo sapiens
WYQQKPAQPPKVLIY

SEQ ID NO: 807 - protein, 187 aa, Homo sapiens
QVQLVQSGAEVKKPGSSVKVSCKASGDTFGSYSITWVRQAPGQGLEWMGRIIPVLGIANYAQKFQGRVTITADKSTSTAYMELSSLRSEDTAVYYCAGGGCSGGNCYSWYNWFDPWGQGSLVTVSSASTKGPSVFPLAPSSKSTSGGTAALGCLVKDYFPEPVTVSWNSGALTSGVHTFPAVLQSSG

SEQ ID NO: 808 - protein, 126 aa, Homo sapiens
QVQLVQSGAEVKKPGSSVKVSCKASGDTFGSYSITWVRQAPGQGLEWMGRIIPVLGIANYAQKFQGRVTITADKSTSTAYMELSSLRSEDTAVYYCAGGGCSGGNCYSWYNWFDPWGQGSLVTVSS

SEQ ID NO: 809 - protein, 17 aa, Homo sapiens
RIIPVLGIANYAQKFQG

SEQ ID NO: 810 - protein, 17 aa, Homo sapiens
GGCSGGNCYSWYNWFDP

SEQ ID NO: 811 - protein, 30 aa, Homo sapiens
QVQLVQSGAEVKKPGSSVKVSCKASGDTFG

SEQ ID NO: 812 - protein, 32 aa, Homo sapiens
RVTITADKSTSTAYMELSSLRSEDTAVYYCAG

SEQ ID NO: 813 - protein, 11 aa, Homo sapiens
WGQGSLVTVSS

SEQ ID NO: 814 - protein, 188 aa, Homo sapiens
EIVLTQSPGTLSLSPGERATLSCRASQSVSSNYLAWYQQKPGQAPRLLIYGASSRATGIPERFSGSGSGTDFTLTISRLEPEDFAVYYCQQYGRSPYTFGQGTKLEIKRTVAAPSVFIFPPSDEQLKSGTASVVCLLNNFYPREAKVQWKVDNALQSGNSQESVTEQDSKDSTYSLSSTLTLSKADYE

SEQ ID NO: 815 - protein, 108 aa, Homo sapiens
EIVLTQSPGTLSLSPGERATLSCRASQSVSSNYLAWYQQKPGQAPRLLIYGASSRATGIPERFSGSGSGTDFTLTISRLEPEDFAVYYCQQYGRSPYTFGQGTKLEIK

SEQ ID NO: 816 - protein, 12 aa, Homo sapiens
RASQSVSSNYLA

SEQ ID NO: 817 - protein, 9 aa, Homo sapiens
QQYGRSPYT

SEQ ID NO: 818 - protein, 32 aa, Homo sapiens
GIPERFSGSGSGTDFTLTISRLEPEDFAVYYC

SEQ ID NO: 819 - protein, 214 aa, Homo sapiens
QVQLQESGPGLVKPSETLSLTCTVSGGSISSYYWSWIRQPPGKGLEWIGYINYRGITNYNPSLKSRVTISVDMSKNQFSLKLSSVTAADTAVYSCARLAVASRGTVDYWGQGTLVTVSSASTKGPSVFPLAPSSKSTSGGTAALGCLVKDYFPEPVTVSWNSGALTSGVHTFPAVLQSSGLYSLSSVVTVPSSNFGTQTYTCNVDHKPSNTKVD

SEQ ID NO: 820 - protein, 119 aa, Homo sapiens
QVQLQESGPGLVKPSETLSLTCTVSGGSISSYYWSWIRQPPGKGLEWIGYINYRGITNYNPSLKSRVTISVDMSKNQFSLKLSSVTAADTAVYSCARLAVASRGTVDYWGQGTLVTVSS

SEQ ID NO: 821 - protein, 16 aa, Homo sapiens
YINYRGITNYNPSLKS

SEQ ID NO: 822 - protein, 11 aa, Homo sapiens
LAVASRGTVDY

SEQ ID NO: 823 - protein, 32 aa, Homo sapiens
RVTISVDMSKNQFSLKLSSVTAADTAVYSCAR

SEQ ID NO: 824 - protein, 193 aa, Homo sapiens
QSVLTQPPSASGTPGQRVTISCSGSSSNIGSNYVYWYQQLPGTAPKLLIYRNNQRPSGVPDRFSGSKSGTSASLAISGLRSEDEADYYCAAWDDSLSVNVVFGGGTKLTVLGQPKAAPSVTLFPPSSEELQANKATLVCLISDFYPGAVTVAWKADSSPVKAGVETTKPSKQSNNKYAASSYLSLTPEQWKSH

SEQ ID NO: 825 - protein, 111 aa, Homo sapiens
QSVLTQPPSASGTPGQRVTISCSGSSSNIGSNYVYWYQQLPGTAPKLLIYRNNQRPSGVPDRFSGSKSGTSASLAISGLRSEDEADYYCAAWDDSLSVNVVFGGGTKLTVL

SEQ ID NO: 826 - protein, 12 aa, Homo sapiens
AAWDDSLSVNVV

SEQ ID NO: 827 - protein, 186 aa, Homo sapiens
QVQLVQSGTEVKKPGASVKVSCKASGYTFTDYYMHWVRQAPGQGLEWMGRINPTSGGTNYPQKFQGSVTMTRDTSLSTVYMELSGLRSDDTAVYYCARERVTLIQGKNHYYMDVWGTGTTVTVSSASTKGPSVFPLAPSSKSTSGGTAALGCLVKDYFPEPVTVSWNSGALTSGVHTFPAVLQSSG

SEQ ID NO: 828 - protein, 125 aa, Homo sapiens
QVQLVQSGTEVKKPGASVKVSCKASGYTFTDYYMHWVRQAPGQGLEWMGRINPTSGGTNYPQKFQGSVTMTRDTSLSTVYMELSGLRSDDTAVYYCARERVTLIQGKNHYYMDVWGTGTTVTVSS

SEQ ID NO: 829 - protein, 5 aa, Homo sapiens
DYYMH

SEQ ID NO: 830 - protein, 17 aa, Homo sapiens
RINPTSGGTNYPQKFQG

SEQ ID NO: 831 - protein, 16 aa, Homo sapiens
ERVTLIQGKNHYYMDV

SEQ ID NO: 832 - protein, 30 aa, Homo sapiens
QVQLVQSGTEVKKPGASVKVSCKASGYTFT

SEQ ID NO: 833 - protein, 32 aa, Homo sapiens
SVTMTRDTSLSTVYMELSGLRSDDTAVYYCAR

SEQ ID NO: 834 - protein, 11 aa, Homo sapiens
WGTGTTVTVSS

SEQ ID NO: 835 - protein, 193 aa, Homo sapiens
QSALTQPASVSGSPGQSITISCTGTNSDVGGYNYVSWYQQHPGKAPRLMIYDVSNRPSGVSNRFSGSKSGNTASLTISGLQAEDEADYYCSSYTSSSTLVVFGGGTKLTVLGQPKAAPSVTLFPPSSEELQANKATLVCLISDFYPGAVTVAWKADSSPVKAGVETTTPSKQSNNKYAASSYLSLTPEQWKSH

SEQ ID NO: 836 - protein, 111 aa, Homo sapiens
QSALTQPASVSGSPGQSITISCTGTNSDVGGYNYVSWYQQHPGKAPRLMIYDVSNRPSGVSNRFSGSKSGNTASLTISGLQAEDEADYYCSSYTSSSTLVVFGGGTKLTVL

SEQ ID NO: 837 - protein, 14 aa, Homo sapiens
TGTNSDVGGYNYVS

SEQ ID NO: 838 - protein, 11 aa, Homo sapiens
SSYTSSSTLVV

SEQ ID NO: 839 - protein, 15 aa, Homo sapiens
WYQQHPGKAPRLMIY

SEQ ID NO: 840 - protein, 200 aa, Homo sapiens
QVQLVQSGAEVKKPGASVKVSCKASGYTFTTYAMHWVRQAPGQRLEWMGWINAGNGNTKYSQNFQGRVTITRDTSASTAYMELSSLRSEDTAVYYCASLVGGDSSSWYDYMDVWGKGTTVTVSSASTKGPSVFPLAPCSRSTSESTAALGCLVKDYFPEPVTVSWNSGALTSGVHTFPAVLQSSGLYSLSSVVTVPSSNF

SEQ ID NO: 841 - protein, 124 aa, Homo sapiens
QVQLVQSGAEVKKPGASVKVSCKASGYTFTTYAMHWVRQAPGQRLEWMGWINAGNGNTKYSQNFQGRVTITRDTSASTAYMELSSLRSEDTAVYYCASLVGGDSSSWYDYMDVWGKGTTVTVSS

SEQ ID NO: 842 - protein, 5 aa, Homo sapiens
TYAMH

SEQ ID NO: 843 - protein, 17 aa, Homo sapiens
WINAGNGNTKYSQNFQG

SEQ ID NO: 844 - protein, 15 aa, Homo sapiens
LVGGDSSSWYDYMDV

SEQ ID NO: 845 - protein, 32 aa, Homo sapiens
RVTITRDTSASTAYMELSSLRSEDTAVYYCAS

SEQ ID NO: 846 - protein, 187 aa, Homo sapiens
DIQMTQSPSTLSASVGDRVTITCRASQSISSWLAWYQQKPGKAPKLLIYDASSLESGVPSRFSGSGSGTEFTLTISSLQPDDFATYYCQQYNSYPWTFGQGTKVEIKRTVAAPSVFIFPPSDEQLKSGTASVVCLLNNFYPREAKVQWKVDNALQSGNSQESVTEQDSKDSTYSLSSTLTLSKADYE

SEQ ID NO: 847 - protein, 107 aa, Homo sapiens
DIQMTQSPSTLSASVGDRVTITCRASQSISSWLAWYQQKPGKAPKLLIYDASSLESGVPSRFSGSGSGTEFTLTISSLQPDDFATYYCQQYNSYPWTFGQGTKVEIK

SEQ ID NO: 848 - protein, 180 aa, Homo sapiens
QVQLVQSGAEVKKPGSSVKVSCKASGGTFSSYTISWVRQAPGQGLEWMGRIIPVRDIANYAQKFQGRVTITADKSTRTAYMEVSSLRSEDTAVYYCAATELRSDGLDIWGQGTMVTVSSASTKGPSVFPLAPSSKSTSGGTAALGCLVKDYFPEPVTVSWNSGALTSGVHTFPAVLQSSG

SEQ ID NO: 849 - protein, 119 aa, Homo sapiens
QVQLVQSGAEVKKPGSSVKVSCKASGGTFSSYTISWVRQAPGQGLEWMGRIIPVRDIANYAQKFQGRVTITADKSTRTAYMEVSSLRSEDTAVYYCAATELRSDGLDIWGQGTMVTVSS

SEQ ID NO: 850 - protein, 5 aa, Homo sapiens
SYTIS

SEQ ID NO: 851 - protein, 17 aa, Homo sapiens
RIIPVRDIANYAQKFQG

SEQ ID NO: 852 - protein, 10 aa, Homo sapiens
TELRSDGLDI

SEQ ID NO: 853 - protein, 32 aa, Homo sapiens
RVTITADKSTRTAYMEVSSLRSEDTAVYYCAA

SEQ ID NO: 854 - protein, 188 aa, Homo sapiens
DIQMTQSPSTLSASVGDRVTITCRASQSISSWLAWYQQKPGKAPKLLIYDASSLESGVPSRFSGSGSGTEFTLTVSSLQPDDFATYYCQQYNNYSPITFGQGTKLEIKRTVAAPSVFIFPPSDEQLKSGTASVVCLLNNFYPREAKVQWKVDNALQSGNSQESVTEQDSKDSTYSLSSTLTLSKADYE

SEQ ID NO: 855 - protein, 108 aa, Homo sapiens
DIQMTQSPSTLSASVGDRVTITCRASQSISSWLAWYQQKPGKAPKLLIYDASSLESGVPSRFSGSGSGTEFTLTVSSLQPDDFATYYCQQYNNYSPITFGQGTKLEIK

SEQ ID NO: 856 - protein, 10 aa, Homo sapiens
QQYNNYSPIT

SEQ ID NO: 857 - protein, 32 aa, Homo sapiens
GVPSRFSGSGSGTEFTLTVSSLQPDDFATYYC

SEQ ID NO: 858 - protein, 178 aa, Homo sapiens
QVQLVQSGAEVKKPGASVKVSCKASGYTFSNYGISWVRQAPGQGLEWMGWISAYNGNTKYPQKLQGRVTMSTDTSTSTAYMELRSLRSDDTAVYYCARETRYGMDVWGQGTTVTVSSASTKGPSVFPLAPSSKSTSGGTAALGCLVKDYFPEPVTVSWNSGALTSGVHTFPAVLQSSG

SEQ ID NO: 859 - protein, 117 aa, Homo sapiens
QVQLVQSGAEVKKPGASVKVSCKASGYTFSNYGISWVRQAPGQGLEWMGWISAYNGNTKYPQKLQGRVTMSTDTSTSTAYMELRSLRSDDTAVYYCARETRYGMDVWGQGTTVTVSS

SEQ ID NO: 860 - protein, 5 aa, Homo sapiens
NYGIS

SEQ ID NO: 861 - protein, 17 aa, Homo sapiens
WISAYNGNTKYPQKLQG

SEQ ID NO: 862 - protein, 8 aa, Homo sapiens
ETRYGMDV

SEQ ID NO: 863 - protein, 30 aa, Homo sapiens
QVQLVQSGAEVKKPGASVKVSCKASGYTFS

SEQ ID NO: 864 - protein, 32 aa, Homo sapiens
RVTMSTDTSTSTAYMELRSLRSDDTAVYYCAR

SEQ ID NO: 865 - protein, 198 aa, Homo sapiens
QPVLTQPPSASASLGASVTLTCTLSSGYSNYKVDWYQQRPGKGPQFVMRVGTGGIVGSKGDGIPDRFSVLGSGLNRYLTIKNIQEEDESDYHCGADHGSGSNFVRVFGGGTKLTVLGQPKAAPSVTLFPPSSEELQANKATLVCLISDFYPGAVTVAWKADSSPVKAGVETTTPSKQSNNKYAASSYLSLTPEQWKSH

SEQ ID NO: 866 - protein, 116 aa, Homo sapiens
QPVLTQPPSASASLGASVTLTCTLSSGYSNYKVDWYQQRPGKGPQFVMRVGTGGIVGSKGDGIPDRFSVLGSGLNRYLTIKNIQEEDESDYHCGADHGSGSNFVRVFGGGTKLTVL

SEQ ID NO: 867 - protein, 12 aa, Homo sapiens
TLSSGYSNYKVD

SEQ ID NO: 868 - protein, 12 aa, Homo sapiens
VGTGGIVGSKGD

SEQ ID NO: 869 - protein, 13 aa, Homo sapiens
GADHGSGSNFVRV

SEQ ID NO: 870 - protein, 22 aa, Homo sapiens
QPVLTQPPSASASLGASVTLTC

SEQ ID NO: 871 - protein, 15 aa, Homo sapiens
WYQQRPGKGPQFVMR

SEQ ID NO: 872 - protein, 32 aa, Homo sapiens
GIPDRFSVLGSGLNRYLTIKNIQEEDESDYHC

SEQ ID NO: 873 - protein, 181 aa, Homo sapiens
EVQLVQSGAEVKKPGESLKISCKGSGYTFTSYWIGWVRQMPGKGLEWMGIIYLGDSDTRYSPSFQGQVTISADKSISTAYLQWNSLKASDTAMYYCARQVTGTTSWFDPWGQGTLVTVSSASTKGPSVFPLAPSSKSTSGGTAALGCLVKDYFPEPVTVSWNSGALTSGVHTFPAVLQSSG

SEQ ID NO: 874 - protein, 120 aa, Homo sapiens
EVQLVQSGAEVKKPGESLKISCKGSGYTFTSYWIGWVRQMPGKGLEWMGIIYLGDSDTRYSPSFQGQVTISADKSISTAYLQWNSLKASDTAMYYCARQVTGTTSWFDPWGQGTLVTVSS

SEQ ID NO: 875 - protein, 17 aa, Homo sapiens
IIYLGDSDTRYSPSFQG

SEQ ID NO: 876 - protein, 11 aa, Homo sapiens
QVTGTTSWFDP

SEQ ID NO: 877 - protein, 30 aa, Homo sapiens
EVQLVQSGAEVKKPGESLKISCKGSGYTFT

SEQ ID NO: 878 - protein, 32 aa, Homo sapiens
QVTISADKSISTAYLQWNSLKASDTAMYYCAR

SEQ ID NO: 879 - protein, 187 aa, Homo sapiens
DIQMTQSPSTLSASVGERVTITCRASQSISRWLAWYQQKPGKAPKLLIYDASSLESGVPSRFSGSGSGTEFTLTISSLQPDDFATYHCHQYSTYSLTFGGGTKVDIKRTVAAPSVFIFPPSDEQLKSGTASVVCLLNNFYPREAKVQWKVDNALQSGNSQESVTEQDSKDSTYSLSSTLTLSKADYE

SEQ ID NO: 880 - protein, 107 aa, Homo sapiens
DIQMTQSPSTLSASVGERVTITCRASQSISRWLAWYQQKPGKAPKLLIYDASSLESGVPSRFSGSGSGTEFTLTISSLQPDDFATYHCHQYSTYSLTFGGGTKVDIK

SEQ ID NO: 881 - protein, 11 aa, Homo sapiens
RASQSISRWLA

SEQ ID NO: 882 - protein, 9 aa, Homo sapiens
HQYSTYSLT

SEQ ID NO: 883 - protein, 23 aa, Homo sapiens
DIQMTQSPSTLSASVGERVTITC

SEQ ID NO: 884 - protein, 32 aa, Homo sapiens
GVPSRFSGSGSGTEFTLTISSLQPDDFATYHC

SEQ ID NO: 885 - protein, 10 aa, Homo sapiens
FGGGTKVDIK

SEQ ID NO: 886 - protein, 144 aa, Homo sapiens
EVQLVESGGDVVQPGGSLRLSCAASGITFSNYWMTWVRQAPGKGLEWVATIKKDGGEQYYVDSVKGRFTISRDNARNSLYLQINSLRAEDTAVYYCARGGSSSSYYWIYWGQGTLVTVSSGSASAPTLFPLVSCENSPSDTSSV

SEQ ID NO: 887 - protein, 120 aa, Homo sapiens
EVQLVESGGDVVQPGGSLRLSCAASGITFSNYWMTWVRQAPGKGLEWVATIKKDGGEQYYVDSVKGRFTISRDNARNSLYLQINSLRAEDTAVYYCARGGSSSSYYWIYWGQGTLVTVSS

SEQ ID NO: 888 - protein, 5 aa, Homo sapiens
NYWMT

SEQ ID NO: 889 - protein, 17 aa, Homo sapiens
TIKKDGGEQYYVDSVKG

SEQ ID NO: 890 - protein, 11 aa, Homo sapiens
GGSSSSYYWIY

SEQ ID NO: 891 - protein, 30 aa, Homo sapiens
EVQLVESGGDVVQPGGSLRLSCAASGITFS

SEQ ID NO: 892 - protein, 32 aa, Homo sapiens
RFTISRDNARNSLYLQINSLRAEDTAVYYCAR

SEQ ID NO: 893 - protein, 188 aa, Homo sapiens
EIVLTQSPGTLSLSPGERATLSCRASQSISNSYLVWYQQKPGQAPRLLIYGASTRATGIPDRFSGSGSGTDFTLTISRLEPEDFAVYYCQQYGSSPWTFGQGTTVEIKRTVAAPSVFIFPPSDEQLKSGTASVVCLLNNFYPREAKVQWKVDNALQSGNSQESVTEQDSKDSTYSLSSTLTLSKADYE

SEQ ID NO: 894 - protein, 108 aa, Homo sapiens
EIVLTQSPGTLSLSPGERATLSCRASQSISNSYLVWYQQKPGQAPRLLIYGASTRATGIPDRFSGSGSGTDFTLTISRLEPEDFAVYYCQQYGSSPWTFGQGTTVEIK

SEQ ID NO: 895 - protein, 12 aa, Homo sapiens
RASQSISNSYLV

SEQ ID NO: 896 - protein, 10 aa, Homo sapiens
FGQGTTVEIK

SEQ ID NO: 897 - protein, 183 aa, Homo sapiens
EVQLVESGGGLVKPGGSLRLSCAASGFTFSSYSMNWVRQAPGKGLEWVSSISSSSSYIYYADSVKGRFTISRDNAKNSLYLQLNSLRAEDTAVYYCARDRDQLIFSAAFDIWGQGTMVTVSSASTKGPSVFPLAPSSKSTSGGTAALGCLVKDYFPEPVTVSWNSGALTSGVHTFPAVLQSSG

SEQ ID NO: 898 - protein, 122 aa, Homo sapiens
EVQLVESGGGLVKPGGSLRLSCAASGFTFSSYSMNWVRQAPGKGLEWVSSISSSSSYIYYADSVKGRFTISRDNAKNSLYLQLNSLRAEDTAVYYCARDRDQLIFSAAFDIWGQGTMVTVSS

SEQ ID NO: 899 - protein, 17 aa, Homo sapiens
SISSSSSYIYYADSVKG

SEQ ID NO: 900 - protein, 13 aa, Homo sapiens
DRDQLIFSAAFDI

SEQ ID NO: 901 - protein, 32 aa, Homo sapiens
RFTISRDNAKNSLYLQLNSLRAEDTAVYYCAR

SEQ ID NO: 902 - protein, 181 aa, Homo sapiens
QSVLTQPPSASGTPGQRVTISCSGSSSNIEHNYVFWYQQLPGTAPKLLIYSNNHRPSGVPDRFSGSKSGTSASLAISGLRSEDEADYYCAAWDASLSGPVVFAGGTKLTVLGQPKAAPSVTLFPPSSEELQANKATLVCLISDFYPGAVTVAWKADSSPVKAGVETTTPSKQSNNKYAASS

SEQ ID NO: 903 - protein, 111 aa, Homo sapiens
QSVLTQPPSASGTPGQRVTISCSGSSSNIEHNYVFWYQQLPGTAPKLLIYSNNHRPSGVPDRFSGSKSGTSASLAISGLRSEDEADYYCAAWDASLSGPVVFAGGTKLTVL

SEQ ID NO: 904 - protein, 13 aa, Homo sapiens
SGSSSNIEHNYVF

SEQ ID NO: 905 - protein, 7 aa, Homo sapiens
SNNHRPS

SEQ ID NO: 906 - protein, 12 aa, Homo sapiens
AAWDASLSGPVV

SEQ ID NO: 907 - protein, 10 aa, Homo sapiens
FAGGTKLTVL

SEQ ID NO: 908 - protein, 181 aa, Homo sapiens
EVQLVESGGGLVQPGGSLRLSCAASGFTFSSYAMSWVRQAPGKGLEWVSAISGSGGSTYYADSVKGRFTISRANSKNTLYLQMNSLRAEDTAVYYCAKGPRFSRDYFDYWGQGTLVTVSSASTKGPSVFPLAPSSKSTSGGTAALGCLVKDYFPEPVTVSWNSGALTSGVHTFPAVLQSSG

SEQ ID NO: 909 - protein, 120 aa, Homo sapiens
EVQLVESGGGLVQPGGSLRLSCAASGFTFSSYAMSWVRQAPGKGLEWVSAISGSGGSTYYADSVKGRFTISRANSKNTLYLQMNSLRAEDTAVYYCAKGPRFSRDYFDYWGQGTLVTVSS

SEQ ID NO: 910 - protein, 17 aa, Homo sapiens
AISGSGGSTYYADSVKG

SEQ ID NO: 911 - protein, 11 aa, Homo sapiens
GPRFSRDYFDY

SEQ ID NO: 912 - protein, 32 aa, Homo sapiens
RFTISRANSKNTLYLQMNSLRAEDTAVYYCAK

SEQ ID NO: 913 - protein, 187 aa, Homo sapiens
DIQMTQSPSTLSASVGDRVTITCRASQSITSWLAWYQQKPGKAPKLLIYDASNLESGVPSRFSGSGSGTEFTLTISSLQPDDFATYYCQQYNNYLGTFGQGTKVEIKRTVAAPSVFIFPPSDEQLKSGTASVVCLLNNFYPREAKVQWKVDNALQSGNSQESVTEQDSKDSTYSLSSTLTLSKADYE

SEQ ID NO: 914 - protein, 107 aa, Homo sapiens
DIQMTQSPSTLSASVGDRVTITCRASQSITSWLAWYQQKPGKAPKLLIYDASNLESGVPSRFSGSGSGTEFTLTISSLQPDDFATYYCQQYNNYLGTFGQGTKVEIK

SEQ ID NO: 915 - protein, 7 aa, Homo sapiens
DASNLES

SEQ ID NO: 916 - protein, 9 aa, Homo sapiens
QQYNNYLGT

SEQ ID NO: 917 - protein, 180 aa, Homo sapiens
QVQLVQSGAEVKKPGSSVKVSCKASGGTFSRYTISWVRQAPGQGLEWMGRIIPILGTANYAQNFQGRVTITADKSTSTAYMELSSLRSEDTAVYYCARHGYSYGPFDYWGQGTLVTVSSASTKGPSVFPLAPSSKSTSGGTAALGCLVKDYFPEPVTVSWNSGALTSGVHTFPAVLQSSG

SEQ ID NO: 918 - protein, 119 aa, Homo sapiens
QVQLVQSGAEVKKPGSSVKVSCKASGGTFSRYTISWVRQAPGQGLEWMGRIIPILGTANYAQNFQGRVTITADKSTSTAYMELSSLRSEDTAVYYCARHGYSYGPFDYWGQGTLVTVSS

SEQ ID NO: 919 - protein, 5 aa, Homo sapiens
RYTIS

SEQ ID NO: 920 - protein, 17 aa, Homo sapiens
RIIPILGTANYAQNFQG

SEQ ID NO: 921 - protein, 10 aa, Homo sapiens
HGYSYGPFDY

SEQ ID NO: 922 - protein, 193 aa, Homo sapiens
DIVMTQSPDSLTVSLGERATINCKSSQSVLYSSNNKNYLAWYQQKPGQPPKLLIYWASTRESGVPDRFSGSGSGTDFTLTVSSLQAEDVAVYYCQQYYSTPGTFGQGTKVEIKRTVAAPSVFIFPPSDEQLKSGTASVVCLLNNFYPREAKVQWKVDNALQSGNSQESVTEQDSKDSTYSLSSTLTLSKADYE

SEQ ID NO: 923 - protein, 113 aa, Homo sapiens
DIVMTQSPDSLTVSLGERATINCKSSQSVLYSSNNKNYLAWYQQKPGQPPKLLIYWASTRESGVPDRFSGSGSGTDFTLTVSSLQAEDVAVYYCQQYYSTPGTFGQGTKVEIK

SEQ ID NO: 924 - protein, 9 aa, Homo sapiens
QQYYSTPGT

SEQ ID NO: 925 - protein, 23 aa, Homo sapiens
DIVMTQSPDSLTVSLGERATINC

SEQ ID NO: 926 - protein, 32 aa, Homo sapiens
GVPDRFSGSGSGTDFTLTVSSLQAEDVAVYYC

SEQ ID NO: 927 - protein, 185 aa, Homo sapiens
QVRLQESGPGLVKPSQTLSLTCTVSGGSISSGSYYWSWIRQPAGKGLEWIGRFHTSGSTNYNPSLKSRVTISVDTSKNQFSLKLSSVTAADTAVYYCARDLKGKTWIQTPFDYWGQGILVTVSSASTKGPSVFPLAPSSKSTSGGTAALGCLVKDYFPEPVTVSWNSGALTSGVHTFPAVLQSSG

SEQ ID NO: 928 - protein, 124 aa, Homo sapiens
QVRLQESGPGLVKPSQTLSLTCTVSGGSISSGSYYWSWIRQPAGKGLEWIGRFHTSGSTNYNPSLKSRVTISVDTSKNQFSLKLSSVTAADTAVYYCARDLKGKTWIQTPFDYWGQGILVTVSS

SEQ ID NO: 929 - protein, 7 aa, Homo sapiens
SGSYYWS

SEQ ID NO: 930 - protein, 16 aa, Homo sapiens
RFHTSGSTNYNPSLKS

SEQ ID NO: 931 - protein, 14 aa, Homo sapiens
DLKGKTWIQTPFDY

SEQ ID NO: 932 - protein, 30 aa, Homo sapiens
QVRLQESGPGLVKPSQTLSLTCTVSGGSIS

SEQ ID NO: 933 - protein, 179 aa, Homo sapiens
QSALTQPASVSGSPGQSITISCTGTSSDVGAYNYVSWYQQHPGKAPKLMIYEVSNRPSGVSNRFSGSKSGNTASLTISGLQAEDEADYYCSSYTSSTFFGTGTTVTVLGQPKANPTVTLFPPSSEELQANKATLVCLISDFYPGAVTVAWKADGSPVKAGVETTTPSKQSNNKYAASSY

SEQ ID NO: 934 - protein, 108 aa, Homo sapiens
QSALTQPASVSGSPGQSITISCTGTSSDVGAYNYVSWYQQHPGKAPKLMIYEVSNRPSGVSNRFSGSKSGNTASLTISGLQAEDEADYYCSSYTSSTFFGTGTTVTVL

SEQ ID NO: 935 - protein, 14 aa, Homo sapiens
TGTSSDVGAYNYVS

SEQ ID NO: 936 - protein, 8 aa, Homo sapiens
SSYTSSTF

SEQ ID NO: 937 - protein, 10 aa, Homo sapiens
FGTGTTVTVL

SEQ ID NO: 938 - protein, 159 aa, Homo sapiens
EVQLVESGGGLVQPGGSLRLSCAASGLTFSSYWMSWARQAPGKGLEWVANIKKDGSEKYYVDSVKGRFTISRDNAKNSLYLQMNSLRVEDTAVYYCASEPPHYGGNSGAEYFQHWGQGTLVTVSSAPTKAPDVFPIISGCRHPKDNSPVVLACLITGYH

SEQ ID NO: 939 - protein, 125 aa, Homo sapiens
EVQLVESGGGLVQPGGSLRLSCAASGLTFSSYWMSWARQAPGKGLEWVANIKKDGSEKYYVDSVKGRFTISRDNAKNSLYLQMNSLRVEDTAVYYCASEPPHYGGNSGAEYFQHWGQGTLVTVSS

SEQ ID NO: 940 - protein, 17 aa, Homo sapiens
NIKKDGSEKYYVDSVKG

SEQ ID NO: 941 - protein, 16 aa, Homo sapiens
EPPHYGGNSGAEYFQH

SEQ ID NO: 942 - protein, 30 aa, Homo sapiens
EVQLVESGGGLVQPGGSLRLSCAASGLTFS

SEQ ID NO: 943 - protein, 14 aa, Homo sapiens
WARQAPGKGLEWVA

SEQ ID NO: 944 - protein, 32 aa, Homo sapiens
RFTISRDNAKNSLYLQMNSLRVEDTAVYYCAS

SEQ ID NO: 945 - protein, 179 aa, Homo sapiens
SYVLTQPPSVSVAPGKTARITCGGNNIGSKSVHWYQQRPGQAPVLVIYYDSDRPSGIPERFSGSNSGNTATLTISRVEAGDEADYYCQVWDSSSDHHYVFGTGTKVTVLGQPKANPTVTLFPPSSEELQANKATLVCLISDFYPGAVTVAWKADSSPVKAGVETTKPSKQSNNKYAASS

SEQ ID NO: 946 - protein, 109 aa, Homo sapiens
SYVLTQPPSVSVAPGKTARITCGGNNIGSKSVHWYQQRPGQAPVLVIYYDSDRPSGIPERFSGSNSGNTATLTISRVEAGDEADYYCQVWDSSSDHHYVFGTGTKVTVL

SEQ ID NO: 947 - protein, 7 aa, Homo sapiens
YDSDRPS

SEQ ID NO: 948 - protein, 12 aa, Homo sapiens
QVWDSSSDHHYV

SEQ ID NO: 949 - protein, 22 aa, Homo sapiens
SYVLTQPPSVSVAPGKTARITC

SEQ ID NO: 950 - protein, 15 aa, Homo sapiens
WYQQRPGQAPVLVIY

SEQ ID NO: 951 - protein, 183 aa, Homo sapiens
QVQLVQSGAEVKKPGASVKVSCKASGYIFTGYYMHWVRQAPGQGLEWMGWINPNSGGTNYAQKFQGRVTMTRDTSITTAYMELSRLRSDDTAFYYCARVKRFSIFGVELDYWGQGTLVTVSSASTKGPSVFPLAPSSKSTSGGTAALGCLVKDYFPEPVTVSWNSGALTSGVHTFPAVLQSSG

SEQ ID NO: 952 - protein, 122 aa, Homo sapiens
QVQLVQSGAEVKKPGASVKVSCKASGYIFTGYYMHWVRQAPGQGLEWMGWINPNSGGTNYAQKFQGRVTMTRDTSITTAYMELSRLRSDDTAFYYCARVKRFSIFGVELDYWGQGTLVTVSS

SEQ ID NO: 953 - protein, 17 aa, Homo sapiens
WINPNSGGTNYAQKFQG

SEQ ID NO: 954 - protein, 13 aa, Homo sapiens
VKRFSIFGVELDY

SEQ ID NO: 955 - protein, 30 aa, Homo sapiens
QVQLVQSGAEVKKPGASVKVSCKASGYIFT

SEQ ID NO: 956 - protein, 32 aa, Homo sapiens
RVTMTRDTSITTAYMELSRLRSDDTAFYYCAR

SEQ ID NO: 957 - protein, 181 aa, Homo sapiens
QSALTQPPSASGSPGQSVTISCTGTSSDVGGYNYVSWYQQHPGKAPKLMIYEVSKRPSGVPDRFSGSKSGNTASLTVSGLQAEDEADYFCSSYADSNNLVFGGGTKLTVLGQPKAAPSVTLFPPSSEELQANKATLVCLISDFCPGAVTVAWKADSSPVKAGVETTTPSKQSNNKYAASSY

SEQ ID NO: 958 - protein, 110 aa, Homo sapiens
QSALTQPPSASGSPGQSVTISCTGTSSDVGGYNYVSWYQQHPGKAPKLMIYEVSKRPSGVPDRFSGSKSGNTASLTVSGLQAEDEADYFCSSYADSNNLVFGGGTKLTVL

SEQ ID NO: 959 - protein, 10 aa, Homo sapiens
SSYADSNNLV

SEQ ID NO: 960 - protein, 32 aa, Homo sapiens
GVPDRFSGSKSGNTASLTVSGLQAEDEADYFC

SEQ ID NO: 961 - protein, 134 aa, Homo sapiens
QVQLQESGPGLVKPSETLSLTCTVSGGSISSYYWSWIRQPPGKGLEWIGYIYYSGSTNYNPSLKSRVTISVDTSKNQFSLKLSSVTAADTAVYYCARHQSRWNIVATMDFDYWGQGTLVTVSSASTKGPSVFPL

SEQ ID NO: 962 - protein, 123 aa, Homo sapiens
QVQLQESGPGLVKPSETLSLTCTVSGGSISSYYWSWIRQPPGKGLEWIGYIYYSGSTNYNPSLKSRVTISVDTSKNQFSLKLSSVTAADTAVYYCARHQSRWNIVATMDFDYWGQGTLVTVSS

SEQ ID NO: 963 - protein, 15 aa, Homo sapiens
HQSRWNIVATMDFDY

SEQ ID NO: 964 - protein, 187 aa, Homo sapiens
DIQMTQSPSSLSASVGDRVTITCRASQSIRSYLNWYQQKPGKAPKLLIYAASSLQSGVPSRFSGSGSGTDFTLTIGSLQPEDFATYYCQQSYSTSVAFGQGTKVEIKRTVAAPSVFIFPPSDEQLKSGTASVVCLLNNFYPREAKVQWKVDNALQSGNSQESVTEQDSKDSTYSLSSTLTLSKADYE

SEQ ID NO: 965 - protein, 107 aa, Homo sapiens
DIQMTQSPSSLSASVGDRVTITCRASQSIRSYLNWYQQKPGKAPKLLIYAASSLQSGVPSRFSGSGSGTDFTLTIGSLQPEDFATYYCQQSYSTSVAFGQGTKVEIK

SEQ ID NO: 966 - protein, 9 aa, Homo sapiens
QQSYSTSVA

SEQ ID NO: 967 - protein, 32 aa, Homo sapiens
GVPSRFSGSGSGTDFTLTIGSLQPEDFATYYC

SEQ ID NO: 968 - protein, 183 aa, Homo sapiens
QVQLVQSGAEVKKPGASVKVSCKASGYTFTGYYMHWVRQAPGQGLEWMGWINPNSGGTNYAQKFQGRVTMTRDTSINTAYMELSRLRSDDTAVYYCTRVGRFSIFGVELDYWGQGTLVTVSSASTKGPSVFPLAPSSKSTSGGTAALGCLVKDYFPEPVTVSWNSGALTSGVHTFPAVLQSSG

SEQ ID NO: 969 - protein, 122 aa, Homo sapiens
QVQLVQSGAEVKKPGASVKVSCKASGYTFTGYYMHWVRQAPGQGLEWMGWINPNSGGTNYAQKFQGRVTMTRDTSINTAYMELSRLRSDDTAVYYCTRVGRFSIFGVELDYWGQGTLVTVSS

SEQ ID NO: 970 - protein, 13 aa, Homo sapiens
VGRFSIFGVELDY

SEQ ID NO: 971 - protein, 32 aa, Homo sapiens
RVTMTRDTSINTAYMELSRLRSDDTAVYYCTR

SEQ ID NO: 972 - protein, 180 aa, Homo sapiens
QSALTQPPSASGSPGQSVTISCTGTSSDVGGYNYVSWYQQHPGKAPKLMIYEVNKRPSGVPDRFSGSKSGNTASLTVSGLQADDEADYYCSSYAGSNNLVFGGGTKLTVLGQPKAAPSVTLFPPSSEELQANKATLVCLISDFYPGAVTVAWKADSSPVKAGVETTTPSKQSNNKYAASS

SEQ ID NO: 973 - protein, 110 aa, Homo sapiens
QSALTQPPSASGSPGQSVTISCTGTSSDVGGYNYVSWYQQHPGKAPKLMIYEVNKRPSGVPDRFSGSKSGNTASLTVSGLQADDEADYYCSSYAGSNNLVFGGGTKLTVL

SEQ ID NO: 974 - protein, 7 aa, Homo sapiens
EVNKRPS

SEQ ID NO: 975 - protein, 10 aa, Homo sapiens
SSYAGSNNLV

SEQ ID NO: 976 - protein, 32 aa, Homo sapiens
GVPDRFSGSKSGNTASLTVSGLQADDEADYYC

SEQ ID NO: 977 - protein, 185 aa, Homo sapiens
QVLLVQSGAEVKKPGASVKVSCKASGYTFTGYYLHWVRQAPGQGLEWMGWINPISGGTNYAQNFQDRVTMTRDTSIITAYMELSRLRSDDTAVYYCARLAYYYDSSAYRGAFDIWGQGTMVTVSSASTKGPSVFPLAPSSKSTSGGTAALGCLVKDYFPEPVTVSWNSGALTSGVHTFPAVLQSS

SEQ ID NO: 978 - protein, 125 aa, Homo sapiens
QVLLVQSGAEVKKPGASVKVSCKASGYTFTGYYLHWVRQAPGQGLEWMGWINPISGGTNYAQNFQDRVTMTRDTSIITAYMELSRLRSDDTAVYYCARLAYYYDSSAYRGAFDIWGQGTMVTVSS

SEQ ID NO: 979 - protein, 5 aa, Homo sapiens
GYYLH

SEQ ID NO: 980 - protein, 17 aa, Homo sapiens
WINPISGGTNYAQNFQD

SEQ ID NO: 981 - protein, 16 aa, Homo sapiens
LAYYYDSSAYRGAFDI

SEQ ID NO: 982 - protein, 30 aa, Homo sapiens
QVLLVQSGAEVKKPGASVKVSCKASGYTFT

SEQ ID NO: 983 - protein, 32 aa, Homo sapiens
RVTMTRDTSIITAYMELSRLRSDDTAVYYCAR

SEQ ID NO: 984 - protein, 180 aa, Homo sapiens
QSALTQPASVSGSPGQSITISCTGTSSDVGGYNYVSWYQQHPGKAPKLMIYEVSNRPSGVSDRFSGSKSGNTASLTISGLQAEDEADYYCSSYTSSSTYVFGTGTKVTVLGQPKANPTVTLFPPSSEELQANKATLVCLISDFYPGAVTVAWKADGSPVKAGVETTKPSKQSNNKYAASS

SEQ ID NO: 985 - protein, 110 aa, Homo sapiens
QSALTQPASVSGSPGQSITISCTGTSSDVGGYNYVSWYQQHPGKAPKLMIYEVSNRPSGVSDRFSGSKSGNTASLTISGLQAEDEADYYCSSYTSSSTYVFGTGTKVTVL

SEQ ID NO: 986 - protein, 10 aa, Homo sapiens
SSYTSSSTYV

SEQ ID NO: 987 - protein, 32 aa, Homo sapiens
GVSDRFSGSKSGNTASLTISGLQAEDEADYYC

SEQ ID NO: 988 - protein, 188 aa, Homo sapiens
QVQLVESGGGVVQPGRSLRLSCAASGFTFSYYGMHWVRQAPGKGLEWVAVIWYDGSNKHYADSVKGRFTISRDNSKNTLYLQMNSLRAEDTAVYYCAKNAAPYCSGGSCYGTYFDYWGQGTLVTVSSASTKGPSVFPLAPSSKSTSGGTAALGCLVKDYFPEPVTVSWNSGALTSGVHTFPAVLQSSG

SEQ ID NO: 989 - protein, 127 aa, Homo sapiens
QVQLVESGGGVVQPGRSLRLSCAASGFTFSYYGMHWVRQAPGKGLEWVAVIWYDGSNKHYADSVKGRFTISRDNSKNTLYLQMNSLRAEDTAVYYCAKNAAPYCSGGSCYGTYFDYWGQGTLVTVSS

SEQ ID NO: 990 - protein, 5 aa, Homo sapiens
YYGMH

SEQ ID NO: 991 - protein, 17 aa, Homo sapiens
VIWYDGSNKHYADSVKG

SEQ ID NO: 992 - protein, 18 aa, Homo sapiens
NAAPYCSGGSCYGTYFDY

SEQ ID NO: 993 - protein, 188 aa, Homo sapiens
DIQMTQSPSSLSASVGDRVTITCQASQDINNYLNWYQQKPGKAPKLLIYDASNLETGVPSRFSGSGSGTDFTFTISSLQPEDIATYYCQQYDNVPPHTFGQGTKLEIKRTVAAPSVFIFPPSDEQLKSGTASVVCLLNNFYPREAKVQWKVDNALQSGNSQESVTEQDSKDSTYSLSSTLTLSKADYE

SEQ ID NO: 994 - protein, 108 aa, Homo sapiens
DIQMTQSPSSLSASVGDRVTITCQASQDINNYLNWYQQKPGKAPKLLIYDASNLETGVPSRFSGSGSGTDFTFTISSLQPEDIATYYCQQYDNVPPHTFGQGTKLEIK

SEQ ID NO: 995 - protein, 11 aa, Homo sapiens
QASQDINNYLN

SEQ ID NO: 996 - protein, 10 aa, Homo sapiens
QQYDNVPPHT

SEQ ID NO: 997 - protein, 32 aa, Homo sapiens
GVPSRFSGSGSGTDFTFTISSLQPEDIATYYC

SEQ ID NO: 998 - protein, 146 aa, Homo sapiens
QVQLVQSGAEVKKPGSSVKVSCKASGGTFSSYAISWVRQAPGQGLEWMGGIIPIFGTAKYAQKFQGRVTITADESTSTAYMELSSLRSEDTAVYYCARGKDGYNPWGAFDIWGQGTMVTVSSGSASAPTLFPLVSCENSPSDTSSV

SEQ ID NO: 999 - protein, 122 aa, Homo sapiens
QVQLVQSGAEVKKPGSSVKVSCKASGGTFSSYAISWVRQAPGQGLEWMGGIIPIFGTAKYAQKFQGRVTITADESTSTAYMELSSLRSEDTAVYYCARGKDGYNPWGAFDIWGQGTMVTVSS

SEQ ID NO: 1000 - protein, 17 aa, Homo sapiens
GIIPIFGTAKYAQKFQG

SEQ ID NO: 1001 - protein, 13 aa, Homo sapiens
GKDGYNPWGAFDI

SEQ ID NO: 1002 - protein, 32 aa, Homo sapiens
RVTITADESTSTAYMELSSLRSEDTAVYYCAR

SEQ ID NO: 1003 - protein, 193 aa, Homo sapiens
QSALTQPPSASGSPGQSVTISCTGTSSDVGGYNYVSWYQQHPGKAPKLMIYEVSKRPSGVPDRFSGSKSGNTASLTVSGLQAEDEADYYCSSYAGSNNFGVFGGGTKLTVLGQPKAAPSVTLFPPSSEELQANKATLVCLISDFYPGAVTVAWKADSSPVKAGVETTTPSKQSNNKYAASSYLSLTPEQWKSH

SEQ ID NO: 1004 - protein, 111 aa, Homo sapiens
QSALTQPPSASGSPGQSVTISCTGTSSDVGGYNYVSWYQQHPGKAPKLMIYEVSKRPSGVPDRFSGSKSGNTASLTVSGLQAEDEADYYCSSYAGSNNFGVFGGGTKLTVL

SEQ ID NO: 1005 - protein, 11 aa, Homo sapiens
SSYAGSNNFGV

SEQ ID NO: 1006 - protein, 32 aa, Homo sapiens
GVPDRFSGSKSGNTASLTVSGLQAEDEADYYC

SEQ ID NO: 1007 - protein, 177 aa, Homo sapiens
EVQLVESGGGLVQPGGSLRLSCVASGFTFSDYAMHWVRQAPGKGLEYIAAISSNGGRTYYADSVKDKFTISRDNSKNILYLHMGSLRAEDTAVYFCARDPQSWVTSTTAHFQHWGQGTLVTVSSASPTSPKVFPLSLCSTQPDGNVVIACLVQGFFPQEPLSVTWSESGQGVTARNF

SEQ ID NO: 1008 - protein, 124 aa, Homo sapiens
EVQLVESGGGLVQPGGSLRLSCVASGFTFSDYAMHWVRQAPGKGLEYIAAISSNGGRTYYADSVKDKFTISRDNSKNILYLHMGSLRAEDTAVYFCARDPQSWVTSTTAHFQHWGQGTLVTVSS

SEQ ID NO: 1009 - protein, 5 aa, Homo sapiens
DYAMH

SEQ ID NO: 1010 - protein, 17 aa, Homo sapiens
AISSNGGRTYYADSVKD

SEQ ID NO: 1011 - protein, 15 aa, Homo sapiens
DPQSWVTSTTAHFQH

SEQ ID NO: 1012 - protein, 30 aa, Homo sapiens
EVQLVESGGGLVQPGGSLRLSCVASGFTFS

SEQ ID NO: 1013 - protein, 14 aa, Homo sapiens
WVRQAPGKGLEYIA

SEQ ID NO: 1014 - protein, 32 aa, Homo sapiens
KFTISRDNSKNILYLHMGSLRAEDTAVYFCAR

SEQ ID NO: 1015 - protein, 181 aa, Homo sapiens
QSALTQPASVSGSPGQSITISCTGTSSDIGGYNYVSWYQQHPGKAPKLIISDVSNRPSGVSSRFSGSKSGNTASLTISGLQTEDEAHYYCSSFRSGITLGVFGGGTKLTVLGQPKAAPSVTLFPPSSEELQANKATLVCLISDFYPGAVTVAWKADSSPVKAGVETTTPSKQSNNKYAASS

SEQ ID NO: 1016 - protein, 111 aa, Homo sapiens
QSALTQPASVSGSPGQSITISCTGTSSDIGGYNYVSWYQQHPGKAPKLIISDVSNRPSGVSSRFSGSKSGNTASLTISGLQTEDEAHYYCSSFRSGITLGVFGGGTKLTVL

SEQ ID NO: 1017 - protein, 14 aa, Homo sapiens
TGTSSDIGGYNYVS

SEQ ID NO: 1018 - protein, 11 aa, Homo sapiens
SSFRSGITLGV

SEQ ID NO: 1019 - protein, 15 aa, Homo sapiens
WYQQHPGKAPKLIIS

SEQ ID NO: 1020 - protein, 32 aa, Homo sapiens
GVSSRFSGSKSGNTASLTISGLQTEDEAHYYC

SEQ ID NO: 1021 - protein, 183 aa, Homo sapiens
QVQLVQSGAEVKKPGASVKVSCKASGYTFTGYYMHWVRQAPGQGLEWMGWINPNSGAINYAQKFQGRVTMTRDTSISTAYMELSSLRSDDTAVYYCARVGRFSIFGVELDNWGQGTLVTVSSASTKGPSVFPLAPSSKSTSGGTAALGCLVKDYFPEPVTVSWNSGALTSGVHTFPAVLQSSG

SEQ ID NO: 1022 - protein, 122 aa, Homo sapiens
QVQLVQSGAEVKKPGASVKVSCKASGYTFTGYYMHWVRQAPGQGLEWMGWINPNSGAINYAQKFQGRVTMTRDTSISTAYMELSSLRSDDTAVYYCARVGRFSIFGVELDNWGQGTLVTVSS

SEQ ID NO: 1023 - protein, 17 aa, Homo sapiens
WINPNSGAINYAQKFQG

SEQ ID NO: 1024 - protein, 13 aa, Homo sapiens
VGRFSIFGVELDN

SEQ ID NO: 1025 - protein, 32 aa, Homo sapiens
RVTMTRDTSISTAYMELSSLRSDDTAVYYCAR

SEQ ID NO: 1026 - protein, 192 aa, Homo sapiens
QSALTQPPSASGSPGQSVTISCTGTSSDVGGYNFVSWYQQHPGKAPKLMIYEVSKRPSGVPDRFSGSKSGNTASLTVSGLQAEDEADYYCSSYGGSNNLIFGGGTRLTVLGQPKAAPSVTLFPPSSEELQANKATLVCLISDFYPGAVTVAWKADSSPVKAGVETTTPSKQSNNKYAASSYLSLTPEQWKSH

SEQ ID NO: 1027 - protein, 110 aa, Homo sapiens
QSALTQPPSASGSPGQSVTISCTGTSSDVGGYNFVSWYQQHPGKAPKLMIYEVSKRPSGVPDRFSGSKSGNTASLTVSGLQAEDEADYYCSSYGGSNNLIFGGGTRLTVL

SEQ ID NO: 1028 - protein, 14 aa, Homo sapiens
TGTSSDVGGYNFVS

SEQ ID NO: 1029 - protein, 10 aa, Homo sapiens
SSYGGSNNLI

SEQ ID NO: 1030 - protein, 146 aa, Homo sapiens
QVQLQESGPGLVKPSETLSLTCTVSGGSISSYYWSWIRQPPGKGLEWIGYIYYSGSTKYNPSLKSRVTISVDTSKKQFSLKLSSVTAADTAVYYCARHIKIGVVGGLTFDFWGQGTLVTVSSGSASAPTLFPLVSCENSPSDTSSV

SEQ ID NO: 1031 - protein, 122 aa, Homo sapiens
QVQLQESGPGLVKPSETLSLTCTVSGGSISSYYWSWIRQPPGKGLEWIGYIYYSGSTKYNPSLKSRVTISVDTSKKQFSLKLSSVTAADTAVYYCARHIKIGVVGGLTFDFWGQGTLVTVSS

SEQ ID NO: 1032 - protein, 14 aa, Homo sapiens
HIKIGVVGGLTFDF

SEQ ID NO: 1033 - protein, 32 aa, Homo sapiens
RVTISVDTSKKQFSLKLSSVTAADTAVYYCAR

SEQ ID NO: 1034 - protein, 153 aa, Homo sapiens
DIQMTQSPSSLSASIGDRVTITCRASQSISTYLNWYQQKPGKAPKLLIYAASSLQSGVPSRFSGSGSGADFTLTISSLQPEDFATYYCQQSYSTPLTFGGGTKVEIKRTVAAPSVFIFPPSDEQLKSGTASVVCLLNNFYPREAKVQWKVDNA

SEQ ID NO: 1035 - protein, 107 aa, Homo sapiens
DIQMTQSPSSLSASIGDRVTITCRASQSISTYLNWYQQKPGKAPKLLIYAASSLQSGVPSRFSGSGSGADFTLTISSLQPEDFATYYCQQSYSTPLTFGGGTKVEIK

SEQ ID NO: 1036 - protein, 11 aa, Homo sapiens
RASQSISTYLN

SEQ ID NO: 1037 - protein, 9 aa, Homo sapiens
QQSYSTPLT

SEQ ID NO: 1038 - protein, 23 aa, Homo sapiens
DIQMTQSPSSLSASIGDRVTITC

SEQ ID NO: 1039 - protein, 32 aa, Homo sapiens
GVPSRFSGSGSGADFTLTISSLQPEDFATYYC

SEQ ID NO: 1040 - protein, 146 aa, Homo sapiens
QVQLVQSGAEVKKPGASVKVSCKASGYTFTGYYMHWVRQAPGQGLEWMGWINPNSGGTNYAQKFQGRVTMTRDTSISTAYMELSRLRCDDTAVYYCARASTPYSSGSWADYWGQGTLVTVSSGSASAPTLFPLVSCENSPSDTSSV

SEQ ID NO: 1041 - protein, 122 aa, Homo sapiens
QVQLVQSGAEVKKPGASVKVSCKASGYTFTGYYMHWVRQAPGQGLEWMGWINPNSGGTNYAQKFQGRVTMTRDTSISTAYMELSRLRCDDTAVYYCARASTPYSSGSWADYWGQGTLVTVSS

SEQ ID NO: 1042 - protein, 13 aa, Homo sapiens
ASTPYSSGSWADY

SEQ ID NO: 1043 - protein, 32 aa, Homo sapiens
RVTMTRDTSISTAYMELSRLRCDDTAVYYCAR

SEQ ID NO: 1044 - protein, 185 aa, Homo sapiens
QSALTQPASVSGSPGQSITISCTGTSSDVGGYNYVSWYQQHPGKAPKLMIYDVSNRPSGVSNRFSGSKSGNTASLTISGLQAEDEADYYCSSYASSSTWVFGGGTKLTVLGQPKAAPSVTLFPPSSEELQANKATLVCLISDFYPGAVTVAWKADSSPVKAGVETTTPSKQSNNKYAASSYLSLT

SEQ ID NO: 1045 - protein, 110 aa, Homo sapiens
QSALTQPASVSGSPGQSITISCTGTSSDVGGYNYVSWYQQHPGKAPKLMIYDVSNRPSGVSNRFSGSKSGNTASLTISGLQAEDEADYYCSSYASSSTWVFGGGTKLTVL

SEQ ID NO: 1046 - protein, 10 aa, Homo sapiens
SSYASSSTWV

SEQ ID NO: 1047 - protein, 126 aa, Homo sapiens
QVQLVESGGGLVKPGGSLRLSCAASGFTFSDYYMSWIRQAPGKGLEWVSYISISDTTIYYADAVQGRFTMSRDNAKNSLYLQMNSLKAEDTAVYYCARASPYCGGDCSFGNAFDIWGLGTMVTVSS

SEQ ID NO: 1048 - protein, 98 aa, Homo sapiens
QVQLVESGGGLVKPGGSLRLSCAASGFTFSDYYMSWIRQAPGKGLEWVSYISISDTTIYYADAVQGRFTMSRDNAKNSLYLQMNSLKAEDTAVYYCAR

SEQ ID NO: 1049 - protein, 5 aa, Homo sapiens
DYYMS

SEQ ID NO: 1050 - protein, 17 aa, Homo sapiens
YISISDTTIYYADAVQG

SEQ ID NO: 1051 - protein, 17 aa, Homo sapiens
ASPYCGGDCSFGNAFDI

SEQ ID NO: 1052 - protein, 30 aa, Homo sapiens
QVQLVESGGGLVKPGGSLRLSCAASGFTFS

SEQ ID NO: 1053 - protein, 14 aa, Homo sapiens
WIRQAPGKGLEWVS

SEQ ID NO: 1054 - protein, 32 aa, Homo sapiens
RFTMSRDNAKNSLYLQMNSLKAEDTAVYYCAR

SEQ ID NO: 1055 - protein, 11 aa, Homo sapiens
WGLGTMVTVSS

SEQ ID NO: 1056 - protein, 106 aa, Homo sapiens
DIQMTQSPSTLSASVGDRVTITCRASQSIFSWLAWYQQKPGKAPKLLIYDASSLESGVPSRFSGSGSGTEFTLTISSLQPDDFATYYCQQYNSYWTFGQGTKVEIK

SEQ ID NO: 1057 - protein, 94 aa, Homo sapiens
DIQMTQSPSTLSASVGDRVTITCRASQSIFSWLAWYQQKPGKAPKLLIYDASSLESGVPSRFSGSGSGTEFTLTISSLQPDDFATYYCQQYNSY

SEQ ID NO: 1058 - protein, 11 aa, Homo sapiens
RASQSIFSWLA

SEQ ID NO: 1059 - protein, 8 aa, Homo sapiens
QQYNSYWT

SEQ ID NO: 1060 - protein, 113 aa, Homo sapiens
QVQLVESGGGVVQPGRSLRLSCAASGFTFRNFGMHWVRQAPGKGLEWVAFIWTAESDKFYADSVKGRFTVSRDNSKNTLYLEMNSLRAEDTAVYYCTKAMDVWGRGTTVTVSS

SEQ ID NO: 1061 - protein, 98 aa, Homo sapiens
QVQLVESGGGVVQPGRSLRLSCAASGFTFRNFGMHWVRQAPGKGLEWVAFIWTAESDKFYADSVKGRFTVSRDNSKNTLYLEMNSLRAEDTAVYYCTK

SEQ ID NO: 1062 - protein, 5 aa, Homo sapiens
NFGMH

SEQ ID NO: 1063 - protein, 17 aa, Homo sapiens
FIWTAESDKFYADSVKG

SEQ ID NO: 1064 - protein, 4 aa, Homo sapiens
AMDV

SEQ ID NO: 1065 - protein, 30 aa, Homo sapiens
QVQLVESGGGVVQPGRSLRLSCAASGFTFR

SEQ ID NO: 1066 - protein, 32 aa, Homo sapiens
RFTVSRDNSKNTLYLEMNSLRAEDTAVYYCTK

SEQ ID NO: 1067 - protein, 11 aa, Homo sapiens
WGRGTTVTVSS

SEQ ID NO: 1068 - protein, 107 aa, Homo sapiens
EIVLTQSPATLSLSPGERATLSCRASQSVSTSLAWYQQKCGQAPRLLIYDASNRATGIPARFSGSGSGTDFTLTISSLEPEDFAVYYCQQRGNWPFTFGPGTRVDIK

SEQ ID NO: 1069 - protein, 95 aa, Homo sapiens
EIVLTQSPATLSLSPGERATLSCRASQSVSTSLAWYQQKCGQAPRLLIYDASNRATGIPARFSGSGSGTDFTLTISSLEPEDFAVYYCQQRGNWP

SEQ ID NO: 1070 - protein, 11 aa, Homo sapiens
RASQSVSTSLA

SEQ ID NO: 1071 - protein, 9 aa, Homo sapiens
QQRGNWPFT

SEQ ID NO: 1072 - protein, 15 aa, Homo sapiens
WYQQKCGQAPRLLIY

SEQ ID NO: 1073 - protein, 10 aa, Homo sapiens
FGPGTRVDIK

SEQ ID NO: 1074 - protein, 125 aa, Homo sapiens
QVQLVQSGAEVKKPGASVKVSCKVSGYTLTELSMHWVRQAPGKGLEWMGGFDPEDGETIYAQKFQGRVTMTEDTSTDTAYMELSSLRSEDTAVYYCATGGLGCSNGVCNNWFDPWGLGTLVTVSS

SEQ ID NO: 1075 - protein, 98 aa, Homo sapiens
QVQLVQSGAEVKKPGASVKVSCKVSGYTLTELSMHWVRQAPGKGLEWMGGFDPEDGETIYAQKFQGRVTMTEDTSTDTAYMELSSLRSEDTAVYYCAT

SEQ ID NO: 1076 - protein, 16 aa, Homo sapiens
GGLGCSNGVCNNWFDP

SEQ ID NO: 1077 - protein, 30 aa, Homo sapiens
QVQLVQSGAEVKKPGASVKVSCKVSGYTLT

SEQ ID NO: 1078 - protein, 32 aa, Homo sapiens
RVTMTEDTSTDTAYMELSSLRSEDTAVYYCAT

SEQ ID NO: 1079 - protein, 11 aa, Homo sapiens
WGLGTLVTVSS

SEQ ID NO: 1080 - protein, 107 aa, Homo sapiens
EIVMTQSPATLSVSPGERATLSCRASQSITSNLAWYQQKPGQAPRLLIYGASTRATGIPARFSGSGSGTEFTLTISNLQSEDFAVYYCQQYNNWPLTFGQGTKVEIK

SEQ ID NO: 1081 - protein, 95 aa, Homo sapiens
EIVMTQSPATLSVSPGERATLSCRASQSITSNLAWYQQKPGQAPRLLIYGASTRATGIPARFSGSGSGTEFTLTISNLQSEDFAVYYCQQYNNWP

SEQ ID NO: 1082 - protein, 11 aa, Homo sapiens
RASQSITSNLA

SEQ ID NO: 1083 - protein, 9 aa, Homo sapiens
QQYNNWPLT

SEQ ID NO: 1084 - protein, 32 aa, Homo sapiens
GIPARFSGSGSGTEFTLTISNLQSEDFAVYYC

SEQ ID NO: 1085 - protein, 127 aa, Homo sapiens
QVQLVQSGAEVKKPGASVKVSCKVSGYTLTELSMHWVRQAPGKGLEWMGGFDPEDAETIYAQKFQGRVTMTEDTSTDTAYMELSSLRSEDTAVYYCATGGFPVNSLYDILTGYLDYWGQGTLVTVSS

SEQ ID NO: 1086 - protein, 98 aa, Homo sapiens
QVQLVQSGAEVKKPGASVKVSCKVSGYTLTELSMHWVRQAPGKGLEWMGGFDPEDAETIYAQKFQGRVTMTEDTSTDTAYMELSSLRSEDTAVYYCAT

SEQ ID NO: 1087 - protein, 17 aa, Homo sapiens
GFDPEDAETIYAQKFQG

SEQ ID NO: 1088 - protein, 18 aa, Homo sapiens
GGFPVNSLYDILTGYLDY

SEQ ID NO: 1089 - protein, 107 aa, Homo sapiens
EIVMTQSPATLSVSPGERATLSCRASQNVSSNLAWYQQKPGQAPRLLIYGASTRATGIPARFSGSGSGTEFTLTISSLQSEDFAVYYCQQYNNWPHTFGPGTKVDIK

SEQ ID NO: 1090 - protein, 95 aa, Homo sapiens
EIVMTQSPATLSVSPGERATLSCRASQNVSSNLAWYQQKPGQAPRLLIYGASTRATGIPARFSGSGSGTEFTLTISSLQSEDFAVYYCQQYNNWP

SEQ ID NO: 1091 - protein, 11 aa, Homo sapiens
RASQNVSSNLA

SEQ ID NO: 1092 - protein, 9 aa, Homo sapiens
QQYNNWPHT

SEQ ID NO: 1093 - protein, 125 aa, Homo sapiens
QVQMVESGGGVVQPGGSLRLSCAVSGFTFNNFGMHWVRQAPGKGLEWVAFISYEGSKKSYADSVKGRFTISRDSSKNTLYLQMNSLRPEDTSVYYCAKELAIFMIYAGRYGLDVWGQGTTVTVSS

SEQ ID NO: 1094 - protein, 98 aa, Homo sapiens
QVQMVESGGGVVQPGGSLRLSCAVSGFTFNNFGMHWVRQAPGKGLEWVAFISYEGSKKSYADSVKGRFTISRDSSKNTLYLQMNSLRPEDTSVYYCAK

SEQ ID NO: 1095 - protein, 17 aa, Homo sapiens
FISYEGSKKSYADSVKG

SEQ ID NO: 1096 - protein, 16 aa, Homo sapiens
ELAIFMIYAGRYGLDV

SEQ ID NO: 1097 - protein, 30 aa, Homo sapiens
QVQMVESGGGVVQPGGSLRLSCAVSGFTFN

SEQ ID NO: 1098 - protein, 32 aa, Homo sapiens
RFTISRDSSKNTLYLQMNSLRPEDTSVYYCAK

SEQ ID NO: 1099 - protein, 110 aa, Homo sapiens
SALTQPASVSGSPGQSITISCTGIYSDVDDYTSVSWYQQHPGKAPTLIIYDVTKRPSGVSNRFSASNSDNTASLTISGLQAEDEAEYYCCSRGSATNSYVFGTGTKVTVL

SEQ ID NO: 1100 - protein, 94 aa, Homo sapiens
SALTQPASVSGSPGQSITISCTGIYSDVDDYTSVSWYQQHPGKAPTLIIYDVTKRPSGVSNRFSASNSDNTASLTISGLQAEDEAEYYCCSRGS

SEQ ID NO: 1101 - protein, 14 aa, Homo sapiens
TGIYSDVDDYTSVS

SEQ ID NO: 1102 - protein, 7 aa, Homo sapiens
DVTKRPS

SEQ ID NO: 1103 - protein, 11 aa, Homo sapiens
CSRGSATNSYV

SEQ ID NO: 1104 - protein, 21 aa, Homo sapiens
SALTQPASVSGSPGQSITISC

SEQ ID NO: 1105 - protein, 15 aa, Homo sapiens
WYQQHPGKAPTLIIY

SEQ ID NO: 1106 - protein, 32 aa, Homo sapiens
GVSNRFSASNSDNTASLTISGLQAEDEAEYYC

SEQ ID NO: 1107 - protein, 128 aa, Homo sapiens
QVQLQESGPGLVKPSETLSLTCNVSGGSVKFFYWSWIRQPPGKGLEWIGYIYYSGSTNYNPSLKSRVTMSVDSPNNQFSLKLRSVTAADTAVYYCARVGRDCSSGICRTYDYYAMDVWGQGTTVTVSS

SEQ ID NO: 1108 - protein, 97 aa, Homo sapiens
QVQLQESGPGLVKPSETLSLTCNVSGGSVKFFYWSWIRQPPGKGLEWIGYIYYSGSTNYNPSLKSRVTMSVDSPNNQFSLKLRSVTAADTAVYYCAR

SEQ ID NO: 1109 - protein, 5 aa, Homo sapiens
FFYWS

SEQ ID NO: 1110 - protein, 20 aa, Homo sapiens
VGRDCSSGICRTYDYYAMDV

SEQ ID NO: 1111 - protein, 30 aa, Homo sapiens
QVQLQESGPGLVKPSETLSLTCNVSGGSVK

SEQ ID NO: 1112 - protein, 32 aa, Homo sapiens
RVTMSVDSPNNQFSLKLRSVTAADTAVYYCAR

SEQ ID NO: 1113 - protein, 111 aa, Homo sapiens
QSVLTQPPSLSGAPGQRVTISCTGSRSNIGAGYAVHWYQQLPGTAPKLLISENTNGPSGVPDRFSGSKSDSSASLAITDLQAADEADYYCQSYDGSLSGWVFGGGTKLTVL

SEQ ID NO: 1114 - protein, 99 aa, Homo sapiens
QSVLTQPPSLSGAPGQRVTISCTGSRSNIGAGYAVHWYQQLPGTAPKLLISENTNGPSGVPDRFSGSKSDSSASLAITDLQAADEADYYCQSYDGSLSG

SEQ ID NO: 1115 - protein, 14 aa, Homo sapiens
TGSRSNIGAGYAVH

SEQ ID NO: 1116 - protein, 7 aa, Homo sapiens
ENTNGPS

SEQ ID NO: 1117 - protein, 11 aa, Homo sapiens
QSYDGSLSGWV

SEQ ID NO: 1118 - protein, 22 aa, Homo sapiens
QSVLTQPPSLSGAPGQRVTISC

SEQ ID NO: 1119 - protein, 15 aa, Homo sapiens
WYQQLPGTAPKLLIS

SEQ ID NO: 1120 - protein, 32 aa, Homo sapiens
GVPDRFSGSKSDSSASLAITDLQAADEADYYC

SEQ ID NO: 1121 - protein, 128 aa, Homo sapiens
QVTLKESGPVLVKPTETLTLTCTVSGFSPSNARMGVSWIRQPPGKALEWLAHVYSNDEKSYSTSLKRRLTISKDTSKRQVVLIMTNLDPADTGTYYCARAQDPRIRFGELLPVYFDNWGQGTLVTVSS

SEQ ID NO: 1122 - protein, 99 aa, Homo sapiens
QVTLKESGPVLVKPTETLTLTCTVSGFSPSNARMGVSWIRQPPGKALEWLAHVYSNDEKSYSTSLKRRLTISKDTSKRQVVLIMTNLDPADTGTYYCAR

SEQ ID NO: 1123 - protein, 7 aa, Homo sapiens
NARMGVS

SEQ ID NO: 1124 - protein, 16 aa, Homo sapiens
HVYSNDEKSYSTSLKR

SEQ ID NO: 1125 - protein, 18 aa, Homo sapiens
AQDPRIRFGELLPVYFDN

SEQ ID NO: 1126 - protein, 30 aa, Homo sapiens
QVTLKESGPVLVKPTETLTLTCTVSGFSPS

SEQ ID NO: 1127 - protein, 32 aa, Homo sapiens
RLTISKDTSKRQVVLIMTNLDPADTGTYYCAR

SEQ ID NO: 1128 - protein, 107 aa, Homo sapiens
DIQMTQSPSSLSAFVGDRVTISCRASQSIVSYLNWYQQKPGKAPKLLLYSASTLQSGVPSRFSGSGSGTDFTLTISSLQPEDFATYYCQQGYTTPWTFGQGTKVEIK

SEQ ID NO: 1129 - protein, 95 aa, Homo sapiens
DIQMTQSPSSLSAFVGDRVTISCRASQSIVSYLNWYQQKPGKAPKLLLYSASTLQSGVPSRFSGSGSGTDFTLTISSLQPEDFATYYCQQGYTTP

SEQ ID NO: 1130 - protein, 11 aa, Homo sapiens
RASQSIVSYLN

SEQ ID NO: 1131 - protein, 7 aa, Homo sapiens
SASTLQS

SEQ ID NO: 1132 - protein, 9 aa, Homo sapiens
QQGYTTPWT

SEQ ID NO: 1133 - protein, 23 aa, Homo sapiens
DIQMTQSPSSLSAFVGDRVTISC

SEQ ID NO: 1134 - protein, 15 aa, Homo sapiens
WYQQKPGKAPKLLLY

SEQ ID NO: 1135 - protein, 122 aa, Homo sapiens
EVQLLESGGGLVLPGGSLRLSCAASGFSFSSYAMSWVRQAPGKGLEWVSGISGRGTSTYYADSVKGRFTISRDNSKNTLYLQMNSLRAEDTAVYYCAKDRVSYGSPYYFDYWGQGTLVTVSS

SEQ ID NO: 1136 - protein, 98 aa, Homo sapiens
EVQLLESGGGLVLPGGSLRLSCAASGFSFSSYAMSWVRQAPGKGLEWVSGISGRGTSTYYADSVKGRFTISRDNSKNTLYLQMNSLRAEDTAVYYCAK

SEQ ID NO: 1137 - protein, 17 aa, Homo sapiens
GISGRGTSTYYADSVKG

SEQ ID NO: 1138 - protein, 13 aa, Homo sapiens
DRVSYGSPYYFDY

SEQ ID NO: 1139 - protein, 30 aa, Homo sapiens
EVQLLESGGGLVLPGGSLRLSCAASGFSFS

SEQ ID NO: 1140 - protein, 107 aa, Homo sapiens
DIVLTQSPATLSLSPGERATLSCGASQSVSSNYLAWYQQEPGLAPRLLIYDASSRATGIPDRFSGSGSGTDFTLTISRLEPEDFAVYYCQQYGSSSTFGQGTRLEIK

SEQ ID NO: 1141 - protein, 95 aa, Homo sapiens
DIVLTQSPATLSLSPGERATLSCGASQSVSSNYLAWYQQEPGLAPRLLIYDASSRATGIPDRFSGSGSGTDFTLTISRLEPEDFAVYYCQQYGSS

SEQ ID NO: 1142 - protein, 12 aa, Homo sapiens
GASQSVSSNYLA

SEQ ID NO: 1143 - protein, 7 aa, Homo sapiens
DASSRAT

SEQ ID NO: 1144 - protein, 8 aa, Homo sapiens
QQYGSSST

SEQ ID NO: 1145 - protein, 23 aa, Homo sapiens
DIVLTQSPATLSLSPGERATLSC

SEQ ID NO: 1146 - protein, 15 aa, Homo sapiens
WYQQEPGLAPRLLIY

SEQ ID NO: 1147 - protein, 113 aa, Homo sapiens
QVQLVESGGGVVQPGRSLRLSCAASGFTFSSYGMHWVRQAPGKGLEWVAVIWYDGSNKYYADSVKGRFTISRDNSKNTLYLQMNSLRAEDTAVYYCARAPDYWGQGTLVTVSS

SEQ ID NO: 1148 - protein, 98 aa, Homo sapiens
QVQLVESGGGVVQPGRSLRLSCAASGFTFSSYGMHWVRQAPGKGLEWVAVIWYDGSNKYYADSVKGRFTISRDNSKNTLYLQMNSLRAEDTAVYYCAR

SEQ ID NO: 1149 - protein, 4 aa, Homo sapiens
APDY

SEQ ID NO: 1150 - protein, 107 aa, Homo sapiens
AIQMTQSPSSLSASVGDRVTITCRASQGIRNDLGWYQQKPGKAPKLLIYAASSLQSGVPSRFSGSGSGTDFTLTISSLQPEDFATYYCLQDYNYPYTFGQGTKLEIK

SEQ ID NO: 1151 - protein, 95 aa, Homo sapiens
AIQMTQSPSSLSASVGDRVTITCRASQGIRNDLGWYQQKPGKAPKLLIYAASSLQSGVPSRFSGSGSGTDFTLTISSLQPEDFATYYCLQDYNYP

SEQ ID NO: 1152 - protein, 11 aa, Homo sapiens
RASQGIRNDLG

SEQ ID NO: 1153 - protein, 9 aa, Homo sapiens
LQDYNYPYT

SEQ ID NO: 1154 - protein, 23 aa, Homo sapiens
AIQMTQSPSSLSASVGDRVTITC

SEQ ID NO: 1155 - protein, 122 aa, Homo sapiens
EVQLLESGGGLVQPGGSLRLSCAVSGFTVSNYGLSWVRQGPGKGLEWVAAISGSGGRTYYADSVKGRFTISRDNSKNTLFLQLNSLRAEDTAVYYCAKGRDELVVGATQDYWGQGTLVTVSS

SEQ ID NO: 1156 - protein, 98 aa, Homo sapiens
EVQLLESGGGLVQPGGSLRLSCAVSGFTVSNYGLSWVRQGPGKGLEWVAAISGSGGRTYYADSVKGRFTISRDNSKNTLFLQLNSLRAEDTAVYYCAK

SEQ ID NO: 1157 - protein, 5 aa, Homo sapiens
NYGLS

SEQ ID NO: 1158 - protein, 17 aa, Homo sapiens
AISGSGGRTYYADSVKG

SEQ ID NO: 1159 - protein, 13 aa, Homo sapiens
GRDELVVGATQDY

SEQ ID NO: 1160 - protein, 30 aa, Homo sapiens
EVQLLESGGGLVQPGGSLRLSCAVSGFTVS

SEQ ID NO: 1161 - protein, 14 aa, Homo sapiens
WVRQGPGKGLEWVA

SEQ ID NO: 1162 - protein, 32 aa, Homo sapiens
RFTISRDNSKNTLFLQLNSLRAEDTAVYYCAK

SEQ ID NO: 1163 - protein, 107 aa, Homo sapiens
DIQMTQSPSSLSASVGDRVTITCRANQNIRSYLNWYQQTPGKAPKLLIYATSSLQSGVPSRFSGSGSGTQFTLTISSLQPEDFATYYCQQSYSIPFDFGPGTKVDIK

SEQ ID NO: 1164 - protein, 95 aa, Homo sapiens
DIQMTQSPSSLSASVGDRVTITCRANQNIRSYLNWYQQTPGKAPKLLIYATSSLQSGVPSRFSGSGSGTQFTLTISSLQPEDFATYYCQQSYSIP

SEQ ID NO: 1165 - protein, 11 aa, Homo sapiens
RANQNIRSYLN

SEQ ID NO: 1166 - protein, 7 aa, Homo sapiens
ATSSLQS

SEQ ID NO: 1167 - protein, 9 aa, Homo sapiens
QQSYSIPFD

SEQ ID NO: 1168 - protein, 32 aa, Homo sapiens
GVPSRFSGSGSGTQFTLTISSLQPEDFATYYC

SEQ ID NO: 1169 - protein, 122 aa, Homo sapiens
EVQLLESGGDLVQPGGSLRLSCVASGFTFRSYAMTWVRQAPGKGLEWVSSISGSGGGTYYADSVKGRFTISRDNSKNTLFLQMNSLRAEDTAVYYCARGREDWLLSLTYGYWGQGALVTVSS

SEQ ID NO: 1170 - protein, 98 aa, Homo sapiens
EVQLLESGGDLVQPGGSLRLSCVASGFTFRSYAMTWVRQAPGKGLEWVSSISGSGGGTYYADSVKGRFTISRDNSKNTLFLQMNSLRAEDTAVYYCAR

SEQ ID NO: 1171 - protein, 5 aa, Homo sapiens
SYAMT

SEQ ID NO: 1172 - protein, 17 aa, Homo sapiens
SISGSGGGTYYADSVKG

SEQ ID NO: 1173 - protein, 13 aa, Homo sapiens
GREDWLLSLTYGY

SEQ ID NO: 1174 - protein, 30 aa, Homo sapiens
EVQLLESGGDLVQPGGSLRLSCVASGFTFR

SEQ ID NO: 1175 - protein, 32 aa, Homo sapiens
RFTISRDNSKNTLFLQMNSLRAEDTAVYYCAR

SEQ ID NO: 1176 - protein, 11 aa, Homo sapiens
WGQGALVTVSS

SEQ ID NO: 1177 - protein, 107 aa, Homo sapiens
DIQMTQSPSSLSASVGDRVPITCRASQSISSYLNWYQQRPGKAPKLLIYAASSLQSGVPSRFSGSGSGTDFTLTISSLQPEDFATYYCQQSYTIPPTFGGGTKVEIK

SEQ ID NO: 1178 - protein, 96 aa, Homo sapiens
DIQMTQSPSSLSASVGDRVPITCRASQSISSYLNWYQQRPGKAPKLLIYAASSLQSGVPSRFSGSGSGTDFTLTISSLQPEDFATYYCQQSYTIPP

SEQ ID NO: 1179 - protein, 9 aa, Homo sapiens
QQSYTIPPT

SEQ ID NO: 1180 - protein, 23 aa, Homo sapiens
DIQMTQSPSSLSASVGDRVPITC

SEQ ID NO: 1181 - protein, 15 aa, Homo sapiens
WYQQRPGKAPKLLIY

SEQ ID NO: 1182 - protein, 115 aa, Homo sapiens
EVQLVESGGGLVQPGGSLRLSCAASGFTFGSYWMNWVRQAPGKGLEWVANINEDGSEKYYVDSVKGRFTISRDNAKNSLYLQMNSLRAEDTAVYYCARGHSLGEWGQGSPVTVSS

SEQ ID NO: 1183 - protein, 98 aa, Homo sapiens
EVQLVESGGGLVQPGGSLRLSCAASGFTFGSYWMNWVRQAPGKGLEWVANINEDGSEKYYVDSVKGRFTISRDNAKNSLYLQMNSLRAEDTAVYYCAR

SEQ ID NO: 1184 - protein, 5 aa, Homo sapiens
SYWMN

SEQ ID NO: 1185 - protein, 17 aa, Homo sapiens
NINEDGSEKYYVDSVKG

SEQ ID NO: 1186 - protein, 6 aa, Homo sapiens
GHSLGE

SEQ ID NO: 1187 - protein, 30 aa, Homo sapiens
EVQLVESGGGLVQPGGSLRLSCAASGFTFG

SEQ ID NO: 1188 - protein, 11 aa, Homo sapiens
WGQGSPVTVSS

SEQ ID NO: 1189 - protein, 108 aa, Homo sapiens
SSELTQDPAVSVALGQTVRITCQGDSLRSYSASWYQQKPGQAPVLVIYIKNKRPSGIPDRFSGSSSGNTASLTITGAQAEDEADYYCNSRDSSGDHLVFGGGTKLTVL

SEQ ID NO: 1190 - protein, 97 aa, Homo sapiens
SSELTQDPAVSVALGQTVRITCQGDSLRSYSASWYQQKPGQAPVLVIYIKNKRPSGIPDRFSGSSSGNTASLTITGAQAEDEADYYCNSRDSSGDHL

SEQ ID NO: 1191 - protein, 11 aa, Homo sapiens
QGDSLRSYSAS

SEQ ID NO: 1192 - protein, 7 aa, Homo sapiens
IKNKRPS

SEQ ID NO: 1193 - protein, 11 aa, Homo sapiens
NSRDSSGDHLV

SEQ ID NO: 1194 - protein, 22 aa, Homo sapiens
SSELTQDPAVSVALGQTVRITC

SEQ ID NO: 1195 - protein, 15 aa, Homo sapiens
WYQQKPGQAPVLVIY

SEQ ID NO: 1196 - protein, 32 aa, Homo sapiens
GIPDRFSGSSSGNTASLTITGAQAEDEADYYC

SEQ ID NO: 1197 - protein, 119 aa, Homo sapiens
EVQLVESGGGLVQPGGSLRLSCAASGFTFSSYSMNWVRQAPGKGLEWVSYISSSSSTIYYADSVKGRFTISRDNAKNSLYLQMNSLRAEDTAVYYCARANWNDMYFDLWGRGTLVTVSS

SEQ ID NO: 1198 - protein, 97 aa, Homo sapiens
EVQLVESGGGLVQPGGSLRLSCAASGFTFSSYSMNWVRQAPGKGLEWVSYISSSSSTIYYADSVKGRFTISRDNAKNSLYLQMNSLRAEDTAVYYCA

SEQ ID NO: 1199 - protein, 10 aa, Homo sapiens
ANWNDMYFDL

SEQ ID NO: 1200 - protein, 106 aa, Homo sapiens
EIVLTQSPGTLSLSPGERATLSCRASQSVSSSYLAWYQQKPGQAPRLLIYGASSRATGIPDRFSGSGSGTDFTLTISRLEPEDFAVYYCQQYGSSPFGQGTKLEIK

SEQ ID NO: 1201 - protein, 96 aa, Homo sapiens
EIVLTQSPGTLSLSPGERATLSCRASQSVSSSYLAWYQQKPGQAPRLLIYGASSRATGIPDRFSGSGSGTDFTLTISRLEPEDFAVYYCQQYGSSP

SEQ ID NO: 1202 - protein, 7 aa, Homo sapiens
QQYGSSP

SEQ ID NO: 1203 - protein, 121 aa, Homo sapiens
QVQLVESGGGVVQPGRSLRLSCAASGFTFSSNAMHWVRQAPGKGLEWVAVISYDGDNKYYADSVKGRFTISRDNSKNTLYLQMNSLRTEDTAVYYCARSLGGNYFYGMDVWGQGTTVTVSS

SEQ ID NO: 1204 - protein, 97 aa, Homo sapiens
QVQLVESGGGVVQPGRSLRLSCAASGFTFSSNAMHWVRQAPGKGLEWVAVISYDGDNKYYADSVKGRFTISRDNSKNTLYLQMNSLRTEDTAVYYCA

SEQ ID NO: 1205 - protein, 5 aa, Homo sapiens
SNAMH

SEQ ID NO: 1206 - protein, 17 aa, Homo sapiens
VISYDGDNKYYADSVKG

SEQ ID NO: 1207 - protein, 12 aa, Homo sapiens
SLGGNYFYGMDV

SEQ ID NO: 1208 - protein, 32 aa, Homo sapiens
RFTISRDNSKNTLYLQMNSLRTEDTAVYYCAR

SEQ ID NO: 1209 - protein, 107 aa, Homo sapiens
EIVLTQSPGTLSLSPGERATLSCRASQSVSSSYLAWYQQKPGQAPRLLIYGASSRAAGIPDRFSGSGSGTDFTLTISRLEPEDFAVYYCQQFGGSWTFGPGTKVEIK

SEQ ID NO: 1210 - protein, 95 aa, Homo sapiens
EIVLTQSPGTLSLSPGERATLSCRASQSVSSSYLAWYQQKPGQAPRLLIYGASSRAAGIPDRFSGSGSGTDFTLTISRLEPEDFAVYYCQQFGGS

SEQ ID NO: 1211 - protein, 7 aa, Homo sapiens
GASSRAA

SEQ ID NO: 1212 - protein, 8 aa, Homo sapiens
QQFGGSWT

SEQ ID NO: 1213 - protein, 10 aa, Homo sapiens
FGPGTKVEIK

SEQ ID NO: 1214 - protein, 123 aa, Homo sapiens
EVQLVESGGGLVQPGGSLRLSCAASGFTFSGYIMNWVRQAPGKGLEWVSSISGGSISISYAGSVKGRFTISRDNAKNSLYLQMNSLRAGDSAVYYCALTTFGVVTSYPSFDYWGQGTLVTVSS

SEQ ID NO: 1215 - protein, 97 aa, Homo sapiens
EVQLVESGGGLVQPGGSLRLSCAASGFTFSGYIMNWVRQAPGKGLEWVSSISGGSISISYAGSVKGRFTISRDNAKNSLYLQMNSLRAGDSAVYYCA

SEQ ID NO: 1216 - protein, 5 aa, Homo sapiens
GYIMN

SEQ ID NO: 1217 - protein, 17 aa, Homo sapiens
SISGGSISISYAGSVKG

SEQ ID NO: 1218 - protein, 14 aa, Homo sapiens
TTFGVVTSYPSFDY

SEQ ID NO: 1219 - protein, 32 aa, Homo sapiens
RFTISRDNAKNSLYLQMNSLRAGDSAVYYCAL

SEQ ID NO: 1220 - protein, 111 aa, Homo sapiens
QSVLTQPPSVSGAPGQRVTISCTGSSSNIGAGYDVHWYQQLPGTAPKLLIYGNSNRPSGVPDRFSGSKSGTSASLAITGLQAEDEADYYCQSYDSSLSGYVFGGGTELTVL

SEQ ID NO: 1221 - protein, 99 aa, Homo sapiens
QSVLTQPPSVSGAPGQRVTISCTGSSSNIGAGYDVHWYQQLPGTAPKLLIYGNSNRPSGVPDRFSGSKSGTSASLAITGLQAEDEADYYCQSYDSSLSG

SEQ ID NO: 1222 - protein, 11 aa, Homo sapiens
QSYDSSLSGYV

SEQ ID NO: 1223 - protein, 10 aa, Homo sapiens
FGGGTELTVL

SEQ ID NO: 1224 - protein, 124 aa, Homo sapiens
QVQLVQSGAEVKKPGSSVKVSCKASGGTFSNYAISWVRQAPGPGLEWMGGIIPFLGIANYAQKFQGRVTITADKSTSTAYMELSSLRSEDTAVYYCARAPGYSSVGSTNYFDPWGQGTLVTVSS

SEQ ID NO: 1225 - protein, 97 aa, Homo sapiens
QVQLVQSGAEVKKPGSSVKVSCKASGGTFSNYAISWVRQAPGPGLEWMGGIIPFLGIANYAQKFQGRVTITADKSTSTAYMELSSLRSEDTAVYYCA

SEQ ID NO: 1226 - protein, 5 aa, Homo sapiens
NYAIS

SEQ ID NO: 1227 - protein, 17 aa, Homo sapiens
GIIPFLGIANYAQKFQG

SEQ ID NO: 1228 - protein, 15 aa, Homo sapiens
APGYSSVGSTNYFDP

SEQ ID NO: 1229 - protein, 14 aa, Homo sapiens
WVRQAPGPGLEWMG

SEQ ID NO: 1230 - protein, 111 aa, Homo sapiens
QSVLTQPPSVSGAPGQRVTISCTGSSSNIGAGYDVHWYQQLPGAAPKLLIYANSNRPSGVPDRFSGSKSGTSASLAITGLQAEDEADYYCQSYDSSLSGYVFGTGTKVTVL

SEQ ID NO: 1231 - protein, 99 aa, Homo sapiens
QSVLTQPPSVSGAPGQRVTISCTGSSSNIGAGYDVHWYQQLPGAAPKLLIYANSNRPSGVPDRFSGSKSGTSASLAITGLQAEDEADYYCQSYDSSLSG

SEQ ID NO: 1232 - protein, 7 aa, Homo sapiens
ANSNRPS

SEQ ID NO: 1233 - protein, 123 aa, Homo sapiens
QVQLQESGPGLVEPSQTLSLTCTVSGGSISSGGYYWSWIRQHPGKGLEWIGYISYSGGSTYYNPSLKSVVTISLDTSKNQFSLKLSSVTAADTAVYYCARVSYGSGSFRFDYWGQGTLVTVSS

SEQ ID NO: 1234 - protein, 100 aa, Homo sapiens
QVQLQESGPGLVEPSQTLSLTCTVSGGSISSGGYYWSWIRQHPGKGLEWIGYISYSGGSTYYNPSLKSVVTISLDTSKNQFSLKLSSVTAADTAVYYCAR

SEQ ID NO: 1235 - protein, 7 aa, Homo sapiens
SGGYYWS

SEQ ID NO: 1236 - protein, 17 aa, Homo sapiens
YISYSGGSTYYNPSLKS

SEQ ID NO: 1237 - protein, 12 aa, Homo sapiens
VSYGSGSFRFDY

SEQ ID NO: 1238 - protein, 30 aa, Homo sapiens
QVQLQESGPGLVEPSQTLSLTCTVSGGSIS

SEQ ID NO: 1239 - protein, 14 aa, Homo sapiens
WIRQHPGKGLEWIG

SEQ ID NO: 1240 - protein, 32 aa, Homo sapiens
VVTISLDTSKNQFSLKLSSVTAADTAVYYCAR

SEQ ID NO: 1241 - protein, 110 aa, Homo sapiens
QSALTQPRSVSGSPGQSVTISCTGTSSDVGGYNYFSWYQHHAGKAPKLMIYDVSKRPSGVPDRFSGSKSGNTASLTISGLQAEDEADYYCCSYAGTYTWVFGGGTKLTVL

SEQ ID NO: 1242 - protein, 98 aa, Homo sapiens
QSALTQPRSVSGSPGQSVTISCTGTSSDVGGYNYFSWYQHHAGKAPKLMIYDVSKRPSGVPDRFSGSKSGNTASLTISGLQAEDEADYYCCSYAGTYT

SEQ ID NO: 1243 - protein, 14 aa, Homo sapiens
TGTSSDVGGYNYFS

SEQ ID NO: 1244 - protein, 10 aa, Homo sapiens
CSYAGTYTWV

SEQ ID NO: 1245 - protein, 15 aa, Homo sapiens
WYQHHAGKAPKLMIY

SEQ ID NO: 1246 - protein, 32 aa, Homo sapiens
GVPDRFSGSKSGNTASLTISGLQAEDEADYYC

SEQ ID NO: 1247 - protein, 120 aa, Homo sapiens
QVQLQESGPGLVKPSETLSLTCTVSGGSINSYSWSWIRQPAGKGLEWIGRISTSGSTNNNPSLKSRVTMSVDTSKDQFSLKLTSVTAADTAVYYCARINGAAAGTPFDYWGQGTLVTVSS

SEQ ID NO: 1248 - protein, 97 aa, Homo sapiens
QVQLQESGPGLVKPSETLSLTCTVSGGSINSYSWSWIRQPAGKGLEWIGRISTSGSTNNNPSLKSRVTMSVDTSKDQFSLKLTSVTAADTAVYYCAR

SEQ ID NO: 1249 - protein, 5 aa, Homo sapiens
SYSWS

SEQ ID NO: 1250 - protein, 16 aa, Homo sapiens
RISTSGSTNNNPSLKS

SEQ ID NO: 1251 - protein, 12 aa, Homo sapiens
INGAAAGTPFDY

SEQ ID NO: 1252 - protein, 32 aa, Homo sapiens
RVTMSVDTSKDQFSLKLTSVTAADTAVYYCAR

SEQ ID NO: 1253 - protein, 104 aa, Homo sapiens
DIQMTQSPSSLSASVGDRVTITCRASQSISNYLNWYQQKPGKAPKLLIYAASSLQSGVPSRFSGSGSGTDFTLTISSLQPEDFATYYCQQSYRTFGQGTKVEIK

SEQ ID NO: 1254 - protein, 94 aa, Homo sapiens
DIQMTQSPSSLSASVGDRVTITCRASQSISNYLNWYQQKPGKAPKLLIYAASSLQSGVPSRFSGSGSGTDFTLTISSLQPEDFATYYCQQSYRT

SEQ ID NO: 1255 - protein, 6 aa, Homo sapiens
QQSYRT

SEQ ID NO: 1256 - protein, 129 aa, Homo sapiens
EVQLVESGGGLVQPGRSLRLSCAASGFTFDDFAMHWVRQAPGKGLEWVSGISWNGGIIGYADSVKARFTISRDNAKNSLYLQMNSLRAEDTALYYCAKTRGDYDYVWGSRSSNYYFDYWGQGTLVTVSS

SEQ ID NO: 1257 - protein, 97 aa, Homo sapiens
EVQLVESGGGLVQPGRSLRLSCAASGFTFDDFAMHWVRQAPGKGLEWVSGISWNGGIIGYADSVKARFTISRDNAKNSLYLQMNSLRAEDTALYYCA

SEQ ID NO: 1258 - protein, 5 aa, Homo sapiens
DFAMH

SEQ ID NO: 1259 - protein, 17 aa, Homo sapiens
GISWNGGIIGYADSVKA

SEQ ID NO: 1260 - protein, 20 aa, Homo sapiens
TRGDYDYVWGSRSSNYYFDY

SEQ ID NO: 1261 - protein, 30 aa, Homo sapiens
EVQLVESGGGLVQPGRSLRLSCAASGFTFD

SEQ ID NO: 1262 - protein, 32 aa, Homo sapiens
RFTISRDNAKNSLYLQMNSLRAEDTALYYCAK

SEQ ID NO: 1263 - protein, 108 aa, Homo sapiens
DIQMTQSPSSLSASVGDRVTITCQASQDISNYLNWYQKKPGKAPKLLIYDATNLETGVPSRFSGSGSGTEFTFTISSLQPEDIATYYCQQYDNVPPITFGPGTKVDMK

SEQ ID NO: 1264 - protein, 96 aa, Homo sapiens
DIQMTQSPSSLSASVGDRVTITCQASQDISNYLNWYQKKPGKAPKLLIYDATNLETGVPSRFSGSGSGTEFTFTISSLQPEDIATYYCQQYDNVPP

SEQ ID NO: 1265 - protein, 7 aa, Homo sapiens
DATNLET

SEQ ID NO: 1266 - protein, 10 aa, Homo sapiens
QQYDNVPPIT

SEQ ID NO: 1267 - protein, 15 aa, Homo sapiens
WYQKKPGKAPKLLIY

SEQ ID NO: 1268 - protein, 32 aa, Homo sapiens
GVPSRFSGSGSGTEFTFTISSLQPEDIATYYC

SEQ ID NO: 1269 - protein, 10 aa, Homo sapiens
FGPGTKVDMK

SEQ ID NO: 1270 - protein, 118 aa, Homo sapiens
EPQLVESGGGLVQPGGSLRLSCAGSGFGFISYPMNWVRQAPGKGPEWISNIRTTAEGGTFYADSVKGRFTMSRDDGKTSIYLQMNSLRDEDTATYYCARDSSYGFDLWGQGTVVTVSS

SEQ ID NO: 1271 - protein, 99 aa, Homo sapiens
EPQLVESGGGLVQPGGSLRLSCAGSGFGFISYPMNWVRQAPGKGPEWISNIRTTAEGGTFYADSVKGRFTMSRDDGKTSIYLQMNSLRDEDTATYYCAR

SEQ ID NO: 1272 - protein, 5 aa, Homo sapiens
SYPMN

SEQ ID NO: 1273 - protein, 18 aa, Homo sapiens
NIRTTAEGGTFYADSVKG

SEQ ID NO: 1274 - protein, 8 aa, Homo sapiens
DSSYGFDL

SEQ ID NO: 1275 - protein, 30 aa, Homo sapiens
EPQLVESGGGLVQPGGSLRLSCAGSGFGFI

SEQ ID NO: 1276 - protein, 14 aa, Homo sapiens
WVRQAPGKGPEWIS

SEQ ID NO: 1277 - protein, 32 aa, Homo sapiens
RFTMSRDDGKTSIYLQMNSLRDEDTATYYCAR

SEQ ID NO: 1278 - protein, 110 aa, Homo sapiens
QSALTQPRSVSGSPGQSVTISCTGTSSDVGGYNYVSWYQQRPGKAPELMIYHVSERPSGVPDRFSGSKSGNTASLTISRLQAEDEADYYCCSYAGSHFWVFGGGTKLTVL

SEQ ID NO: 1279 - protein, 97 aa, Homo sapiens
QSALTQPRSVSGSPGQSVTISCTGTSSDVGGYNYVSWYQQRPGKAPELMIYHVSERPSGVPDRFSGSKSGNTASLTISRLQAEDEADYYCCSYAGSH

SEQ ID NO: 1280 - protein, 7 aa, Homo sapiens
HVSERPS

SEQ ID NO: 1281 - protein, 10 aa, Homo sapiens
CSYAGSHFWV

SEQ ID NO: 1282 - protein, 15 aa, Homo sapiens
WYQQRPGKAPELMIY

SEQ ID NO: 1283 - protein, 32 aa, Homo sapiens
GVPDRFSGSKSGNTASLTISRLQAEDEADYYC

SEQ ID NO: 1284 - protein, 128 aa, Homo sapiens
QVQLQESGPGLVKPSQTLSLTCTVSGGSISSGDYYWSWIRQPPGKGLEWLGYIYYSGSTFYNPSLKSRVTISVDTSKNQFSLRLTSVTAADTAVYFCAREENKFNYGHHPLNGVFAYWGQGTLVTVSS

SEQ ID NO: 1285 - protein, 99 aa, Homo sapiens
QVQLQESGPGLVKPSQTLSLTCTVSGGSISSGDYYWSWIRQPPGKGLEWLGYIYYSGSTFYNPSLKSRVTISVDTSKNQFSLRLTSVTAADTAVYFCAR

SEQ ID NO: 1286 - protein, 16 aa, Homo sapiens
YIYYSGSTFYNPSLKS

SEQ ID NO: 1287 - protein, 18 aa, Homo sapiens
EENKFNYGHHPLNGVFAY

SEQ ID NO: 1288 - protein, 30 aa, Homo sapiens
QVQLQESGPGLVKPSQTLSLTCTVSGGSIS

SEQ ID NO: 1289 - protein, 14 aa, Homo sapiens
WIRQPPGKGLEWLG

SEQ ID NO: 1290 - protein, 32 aa, Homo sapiens
RVTISVDTSKNQFSLRLTSVTAADTAVYFCAR

SEQ ID NO: 1291 - protein, 113 aa, Homo sapiens
DIVMTQSPDSLAVSLGERATINCKSSQSVLYSPNNKNYLAWYQQKPGQPPNLLIYWASTRESGVPDRFSGSGSGTDFTLTINSLQAEDVAVYYCQQSYNTPRTFGQGTKVEIK

SEQ ID NO: 1292 - protein, 101 aa, Homo sapiens
DIVMTQSPDSLAVSLGERATINCKSSQSVLYSPNNKNYLAWYQQKPGQPPNLLIYWASTRESGVPDRFSGSGSGTDFTLTINSLQAEDVAVYYCQQSYNTP

SEQ ID NO: 1293 - protein, 17 aa, Homo sapiens
KSSQSVLYSPNNKNYLA

SEQ ID NO: 1294 - protein, 9 aa, Homo sapiens
QQSYNTPRT

SEQ ID NO: 1295 - protein, 15 aa, Homo sapiens
WYQQKPGQPPNLLIY

SEQ ID NO: 1296 - protein, 32 aa, Homo sapiens
GVPDRFSGSGSGTDFTLTINSLQAEDVAVYYC

SEQ ID NO: 1297 - protein, 128 aa, Homo sapiens
QVTLKESGPVLVKPTETLTLTCTVSGFSLINARLGVSWIRQPPGKALEWLAHIFSDDEKSYSTSLKSRLTISKDTSKSQVVLTMTNMDPVDTATYYCARISWPPYGSGTYYIKAFDIWGQGTLVTVSS

SEQ ID NO: 1298 - protein, 100 aa, Homo sapiens
QVTLKESGPVLVKPTETLTLTCTVSGFSLINARLGVSWIRQPPGKALEWLAHIFSDDEKSYSTSLKSRLTISKDTSKSQVVLTMTNMDPVDTATYYCARI

SEQ ID NO: 1299 - protein, 7 aa, Homo sapiens
NARLGVS

SEQ ID NO: 1300 - protein, 16 aa, Homo sapiens
HIFSDDEKSYSTSLKS

SEQ ID NO: 1301 - protein, 18 aa, Homo sapiens
ISWPPYGSGTYYIKAFDI

SEQ ID NO: 1302 - protein, 30 aa, Homo sapiens
QVTLKESGPVLVKPTETLTLTCTVSGFSLI

SEQ ID NO: 1303 - protein, 32 aa, Homo sapiens
RLTISKDTSKSQVVLTMTNMDPVDTATYYCAR

SEQ ID NO: 1304 - protein, 111 aa, Homo sapiens
QSALTQPVSVSGSPGQSITISCTGTSSDVGGYNYVSWYQQHPGKAPKLMISEVSNRPSGVSNRFSGSKSGNTASLTISGLQAEDEADYYCSSYASSSTLWVFGGGTKLTVL

SEQ ID NO: 1305 - protein, 99 aa, Homo sapiens
QSALTQPVSVSGSPGQSITISCTGTSSDVGGYNYVSWYQQHPGKAPKLMISEVSNRPSGVSNRFSGSKSGNTASLTISGLQAEDEADYYCSSYASSSTL

SEQ ID NO: 1306 - protein, 11 aa, Homo sapiens
SSYASSSTLWV

SEQ ID NO: 1307 - protein, 22 aa, Homo sapiens
QSALTQPVSVSGSPGQSITISC

SEQ ID NO: 1308 - protein, 15 aa, Homo sapiens
WYQQHPGKAPKLMIS

SEQ ID NO: 1309 - protein, 121 aa, Homo sapiens
QVQLQESGPGLVKPSETLSLTCTVSGASISNFYWSWIRQPPGKGLEWIGYIYYSGSTNYNPSLKSRVTMSLDTSKNQFSLNLSSVTAADTAVYYCARIPNFWFGELLFDFWGHGTLVTVSS

SEQ ID NO: 1310 - protein, 97 aa, Homo sapiens
QVQLQESGPGLVKPSETLSLTCTVSGASISNFYWSWIRQPPGKGLEWIGYIYYSGSTNYNPSLKSRVTMSLDTSKNQFSLNLSSVTAADTAVYYCAR

SEQ ID NO: 1311 - protein, 5 aa, Homo sapiens
NFYWS

SEQ ID NO: 1312 - protein, 13 aa, Homo sapiens
IPNFWFGELLFDF

SEQ ID NO: 1313 - protein, 30 aa, Homo sapiens
QVQLQESGPGLVKPSETLSLTCTVSGASIS

SEQ ID NO: 1314 - protein, 32 aa, Homo sapiens
RVTMSLDTSKNQFSLNLSSVTAADTAVYYCAR

SEQ ID NO: 1315 - protein, 11 aa, Homo sapiens
WGHGTLVTVSS

SEQ ID NO: 1316 - protein, 109 aa, Homo sapiens
EIVLTQSPGTLSLSPGERATLSCRASQSVSSNYLAWYQQKPGQAPRLLIYGASSRATGIPDRFSGSGSGTDFTLTISRLEPEDFAVYYCQQYGSSPPITFGQGTRLEIK

SEQ ID NO: 1317 - protein, 97 aa, Homo sapiens
EIVLTQSPGTLSLSPGERATLSCRASQSVSSNYLAWYQQKPGQAPRLLIYGASSRATGIPDRFSGSGSGTDFTLTISRLEPEDFAVYYCQQYGSSPP

SEQ ID NO: 1318 - protein, 10 aa, Homo sapiens
QQYGSSPPIT

SEQ ID NO: 1319 - protein, 131 aa, Homo sapiens
QVQLVQSGAEVKKPGASVKVSCKASGYAFTSYDINWVRQATGQGLEWMGWMNPNSGDTFYAQKFQGRVTMTRSTSISTAYMELSSLRSEDTAVYYCARGRVGADYVSGNRGYYYYYYMDVWGKGTTVTVSS

SEQ ID NO: 1320 - protein, 99 aa, Homo sapiens
QVQLVQSGAEVKKPGASVKVSCKASGYAFTSYDINWVRQATGQGLEWMGWMNPNSGDTFYAQKFQGRVTMTRSTSISTAYMELSSLRSEDTAVYYCARG

SEQ ID NO: 1321 - protein, 5 aa, Homo sapiens
SYDIN

SEQ ID NO: 1322 - protein, 17 aa, Homo sapiens
WMNPNSGDTFYAQKFQG

SEQ ID NO: 1323 - protein, 22 aa, Homo sapiens
GRVGADYVSGNRGYYYYYYMDV

SEQ ID NO: 1324 - protein, 30 aa, Homo sapiens
QVQLVQSGAEVKKPGASVKVSCKASGYAFT

SEQ ID NO: 1325 - protein, 14 aa, Homo sapiens
WVRQATGQGLEWMG

SEQ ID NO: 1326 - protein, 32 aa, Homo sapiens
RVTMTRSTSISTAYMELSSLRSEDTAVYYCAR

SEQ ID NO: 1327 - protein, 109 aa, Homo sapiens
SSELTQDPAVSVALGQTVRITCQGENLRSYYATWYQQKPGQAPILVIYGKNNRPSGIPDRFSGSSSGNTASLTITGAQAEDEADYYCNSRDSSGNHLRVFGGGTKLTVL

SEQ ID NO: 1328 - protein, 97 aa, Homo sapiens
SSELTQDPAVSVALGQTVRITCQGENLRSYYATWYQQKPGQAPILVIYGKNNRPSGIPDRFSGSSSGNTASLTITGAQAEDEADYYCNSRDSSGNHL

SEQ ID NO: 1329 - protein, 11 aa, Homo sapiens
QGENLRSYYAT

SEQ ID NO: 1330 - protein, 7 aa, Homo sapiens
GKNNRPS

SEQ ID NO: 1331 - protein, 12 aa, Homo sapiens
NSRDSSGNHLRV

SEQ ID NO: 1332 - protein, 15 aa, Homo sapiens
WYQQKPGQAPILVIY

SEQ ID NO: 1333 - protein, 118 aa, Homo sapiens
QVQLVESGGGVVQPGRSLRLSCVSSEVTFNRYTMHWVRQAPGKGLEWVASISFEGSVKTYVDSVKGRFTISRDDSKKTLFLQLNSLRDEDTAMYYCARGQWPSGGDYWGRGTLVTVSS

SEQ ID NO: 1334 - protein, 98 aa, Homo sapiens
QVQLVESGGGVVQPGRSLRLSCVSSEVTFNRYTMHWVRQAPGKGLEWVASISFEGSVKTYVDSVKGRFTISRDDSKKTLFLQLNSLRDEDTAMYYCAR

SEQ ID NO: 1335 - protein, 5 aa, Homo sapiens
RYTMH

SEQ ID NO: 1336 - protein, 17 aa, Homo sapiens
SISFEGSVKTYVDSVKG

SEQ ID NO: 1337 - protein, 9 aa, Homo sapiens
GQWPSGGDY

SEQ ID NO: 1338 - protein, 30 aa, Homo sapiens
QVQLVESGGGVVQPGRSLRLSCVSSEVTFN

SEQ ID NO: 1339 - protein, 32 aa, Homo sapiens
RFTISRDDSKKTLFLQLNSLRDEDTAMYYCAR

SEQ ID NO: 1340 - protein, 112 aa, Homo sapiens
DVVLTQSPLSLSVTLGQPASISCRSSQSLVYSDGSTYLNWFHQRPGQSPRRLIYKVSNRDSGVPDRFSGSGSGTDFTLKITRVAAEDVGVYYCMQGTYWPPTFGQGTKVEIK

SEQ ID NO: 1341 - protein, 101 aa, Homo sapiens
DVVLTQSPLSLSVTLGQPASISCRSSQSLVYSDGSTYLNWFHQRPGQSPRRLIYKVSNRDSGVPDRFSGSGSGTDFTLKITRVAAEDVGVYYCMQGTYWPP

SEQ ID NO: 1342 - protein, 16 aa, Homo sapiens
RSSQSLVYSDGSTYLN

SEQ ID NO: 1343 - protein, 7 aa, Homo sapiens
KVSNRDS

SEQ ID NO: 1344 - protein, 9 aa, Homo sapiens
MQGTYWPPT

SEQ ID NO: 1345 - protein, 23 aa, Homo sapiens
DVVLTQSPLSLSVTLGQPASISC

SEQ ID NO: 1346 - protein, 15 aa, Homo sapiens
WFHQRPGQSPRRLIY

SEQ ID NO: 1347 - protein, 32 aa, Homo sapiens
GVPDRFSGSGSGTDFTLKITRVAAEDVGVYYC

SEQ ID NO: 1348 - protein, 123 aa, Homo sapiens
EVQLVQSGAEIKKPGESLKISCQGSGYIFTNNWIGWVRQQPGKGLEWMGIIYPGDSDARYSPSFQGHVSFSADKSINTAFLQWHSLKASDTAMYYCARIRRRGQGATAAFDIWGPGTKVTVSS

SEQ ID NO: 1349 - protein, 98 aa, Homo sapiens
EVQLVQSGAEIKKPGESLKISCQGSGYIFTNNWIGWVRQQPGKGLEWMGIIYPGDSDARYSPSFQGHVSFSADKSINTAFLQWHSLKASDTAMYYCAR

SEQ ID NO: 1350 - protein, 5 aa, Homo sapiens
NNWIG

SEQ ID NO: 1351 - protein, 17 aa, Homo sapiens
IIYPGDSDARYSPSFQG

SEQ ID NO: 1352 - protein, 14 aa, Homo sapiens
IRRRGQGATAAFDI

SEQ ID NO: 1353 - protein, 30 aa, Homo sapiens
EVQLVQSGAEIKKPGESLKISCQGSGYIFT

SEQ ID NO: 1354 - protein, 14 aa, Homo sapiens
WVRQQPGKGLEWMG

SEQ ID NO: 1355 - protein, 32 aa, Homo sapiens
HVSFSADKSINTAFLQWHSLKASDTAMYYCAR

SEQ ID NO: 1356 - protein, 11 aa, Homo sapiens
WGPGTKVTVSS

SEQ ID NO: 1357 - protein, 114 aa, Homo sapiens
DIVMTQSPDSLTVSLGERATINCKSSQNILTTSNNKNYLAWYQQKPGQPPKLLIYWASTRESGVPDRFSGSGSGTDFTLTISSLQAEDVAVYYCQQYFNSPPYTFGQGTKLEIK

SEQ ID NO: 1358 - protein, 102 aa, Homo sapiens
DIVMTQSPDSLTVSLGERATINCKSSQNILTTSNNKNYLAWYQQKPGQPPKLLIYWASTRESGVPDRFSGSGSGTDFTLTISSLQAEDVAVYYCQQYFNSPP

SEQ ID NO: 1359 - protein, 17 aa, Homo sapiens
KSSQNILTTSNNKNYLA

SEQ ID NO: 1360 - protein, 10 aa, Homo sapiens
QQYFNSPPYT

SEQ ID NO: 1361 - protein, 124 aa, Homo sapiens
QVQLVQSGAEVKKPGASVKVSCKASGYTFTGYYMHWVRQAPGQGLEWMGRINPNSGGTNYAQKFQGRVTMTRDTSISTAYMELSRLRSDDTAVYYCARAHQPLLYGLGYYFDYWGQGTLVTVSS

SEQ ID NO: 1362 - protein, 98 aa, Homo sapiens
QVQLVQSGAEVKKPGASVKVSCKASGYTFTGYYMHWVRQAPGQGLEWMGRINPNSGGTNYAQKFQGRVTMTRDTSISTAYMELSRLRSDDTAVYYCAR

SEQ ID NO: 1363 - protein, 15 aa, Homo sapiens
AHQPLLYGLGYYFDY

SEQ ID NO: 1364 - protein, 110 aa, Homo sapiens
QSALTQPASVSGSPGQSITISCTGTSSDVGGYNYVSWYQQHPGKAPKLMIYEVSNRPSGVSNRFSGSKSGNTASLTISGLQAEDEADYYCSSYTSSSTLVFGGGTKLTVL

SEQ ID NO: 1365 - protein, 99 aa, Homo sapiens
QSALTQPASVSGSPGQSITISCTGTSSDVGGYNYVSWYQQHPGKAPKLMIYEVSNRPSGVSNRFSGSKSGNTASLTISGLQAEDEADYYCSSYTSSSTL

SEQ ID NO: 1366 - protein, 10 aa, Homo sapiens
SSYTSSSTLV

SEQ ID NO: 1367 - protein, 117 aa, Homo sapiens
EVQLVESGGGLVQPGGSLRLSCAASGFTFSSYWMHWVRQAPGKGLVWVSRINSDGSSTSYADSVKGRFTISRDNAKNTLYLQMNSLRAEDTAVYYCARDRYSSLDYWGQGTLVTVSS

SEQ ID NO: 1368 - protein, 98 aa, Homo sapiens
EVQLVESGGGLVQPGGSLRLSCAASGFTFSSYWMHWVRQAPGKGLVWVSRINSDGSSTSYADSVKGRFTISRDNAKNTLYLQMNSLRAEDTAVYYCAR

SEQ ID NO: 1369 - protein, 5 aa, Homo sapiens
SYWMH

SEQ ID NO: 1370 - protein, 17 aa, Homo sapiens
RINSDGSSTSYADSVKG

SEQ ID NO: 1371 - protein, 8 aa, Homo sapiens
DRYSSLDY

SEQ ID NO: 1372 - protein, 14 aa, Homo sapiens
WVRQAPGKGLVWVS

SEQ ID NO: 1373 - protein, 32 aa, Homo sapiens
RFTISRDNAKNTLYLQMNSLRAEDTAVYYCAR

SEQ ID NO: 1374 - protein, 109 aa, Homo sapiens
EIVLTQSPGTLSLSPGERATLSCRASQSVSSSYLAWYQQKPGQAPRLLIYGASSRATGIPDRFSGSGSGTDFTLTISRLEPEDFAVYYCQQYGSSPALTFGGGTKVEIK

SEQ ID NO: 1375 - protein, 10 aa, Homo sapiens
QQYGSSPALT

SEQ ID NO: 1376 - protein, 123 aa, Homo sapiens
QVQLVQSGAEVKKPGASVKVSCKTSGYTFTNYFMHWVRQAPGQGLEWMGIINPSGGSASYAQKFQGRITMTSDTSTSTVYMELSSLRSEDTAVYYCAREDIIVVVPARPLDYWGHGTLVTVSS

SEQ ID NO: 1377 - protein, 98 aa, Homo sapiens
QVQLVQSGAEVKKPGASVKVSCKTSGYTFTNYFMHWVRQAPGQGLEWMGIINPSGGSASYAQKFQGRITMTSDTSTSTVYMELSSLRSEDTAVYYCAR

SEQ ID NO: 1378 - protein, 5 aa, Homo sapiens
NYFMH

SEQ ID NO: 1379 - protein, 17 aa, Homo sapiens
IINPSGGSASYAQKFQG

SEQ ID NO: 1380 - protein, 14 aa, Homo sapiens
EDIIVVVPARPLDY

SEQ ID NO: 1381 - protein, 30 aa, Homo sapiens
QVQLVQSGAEVKKPGASVKVSCKTSGYTFT

SEQ ID NO: 1382 - protein, 32 aa, Homo sapiens
RITMTSDTSTSTVYMELSSLRSEDTAVYYCAR

SEQ ID NO: 1383 - protein, 109 aa, Homo sapiens
EIVLTQSPATLSLSPGERATLSCRASQSFSNYLAWYQQKPGQAPRLLIYDASNRATGIPARFSGSGSGTDFTLTISSLEPEDFAVYYCQQRSNWPPLLTFGGGTKVEIK

SEQ ID NO: 1384 - protein, 96 aa, Homo sapiens
EIVLTQSPATLSLSPGERATLSCRASQSFSNYLAWYQQKPGQAPRLLIYDASNRATGIPARFSGSGSGTDFTLTISSLEPEDFAVYYCQQRSNWPP

SEQ ID NO: 1385 - protein, 11 aa, Homo sapiens
RASQSFSNYLA

SEQ ID NO: 1386 - protein, 11 aa, Homo sapiens
QQRSNWPPLLT

SEQ ID NO: 1387 - protein, 124 aa, Homo sapiens
QVHLVQSGAEIRKPGASVMVSCKASGYTFTDYYIHWVRQAPGQGLEWMGWINPNSGGTNYAQKFQGRVTMTRDTSIRTAYMELSRLRSDDAAVYYCAREGISMLRGVRSWFDPWGQGTLVTVSS

SEQ ID NO: 1388 - protein, 98 aa, Homo sapiens
QVHLVQSGAEIRKPGASVMVSCKASGYTFTDYYIHWVRQAPGQGLEWMGWINPNSGGTNYAQKFQGRVTMTRDTSIRTAYMELSRLRSDDAAVYYCAR

SEQ ID NO: 1389 - protein, 5 aa, Homo sapiens
DYYIH

SEQ ID NO: 1390 - protein, 15 aa, Homo sapiens
EGISMLRGVRSWFDP

SEQ ID NO: 1391 - protein, 30 aa, Homo sapiens
QVHLVQSGAEIRKPGASVMVSCKASGYTFT

SEQ ID NO: 1392 - protein, 32 aa, Homo sapiens
RVTMTRDTSIRTAYMELSRLRSDDAAVYYCAR

SEQ ID NO: 1393 - protein, 110 aa, Homo sapiens
QSALTQPASVSGSPGQSITISCTGTSSDVGSYNLVSWYQQHPGKVPKLIIYEVTKRPSGVSNRFSGSKSGNTASLTISGLQTEDEADYYCCSYAGFSAWVFGGGTKLTVL

SEQ ID NO: 1394 - protein, 98 aa, Homo sapiens
QSALTQPASVSGSPGQSITISCTGTSSDVGSYNLVSWYQQHPGKVPKLIIYEVTKRPSGVSNRFSGSKSGNTASLTISGLQTEDEADYYCCSYAGFSA

SEQ ID NO: 1395 - protein, 14 aa, Homo sapiens
TGTSSDVGSYNLVS

SEQ ID NO: 1396 - protein, 7 aa, Homo sapiens
EVTKRPS

SEQ ID NO: 1397 - protein, 10 aa, Homo sapiens
CSYAGFSAWV

SEQ ID NO: 1398 - protein, 15 aa, Homo sapiens
WYQQHPGKVPKLIIY

SEQ ID NO: 1399 - protein, 32 aa, Homo sapiens
GVSNRFSGSKSGNTASLTISGLQTEDEADYYC

SEQ ID NO: 1400 - protein, 123 aa, Homo sapiens
EVQLLESGGGLVQPGGSLRLSCAASGFTFSSYVLSWVRQAPGKGLEWVSAISGSGGITYYADSVKGRFTISRDNSKNTLYLQMNSLRAEDTAVYYCAIRITISGVFTPAWDSWGQGTLVTVSS

SEQ ID NO: 1401 - protein, 97 aa, Homo sapiens
EVQLLESGGGLVQPGGSLRLSCAASGFTFSSYVLSWVRQAPGKGLEWVSAISGSGGITYYADSVKGRFTISRDNSKNTLYLQMNSLRAEDTAVYYCA

SEQ ID NO: 1402 - protein, 5 aa, Homo sapiens
SYVLS

SEQ ID NO: 1403 - protein, 17 aa, Homo sapiens
AISGSGGITYYADSVKG

SEQ ID NO: 1404 - protein, 14 aa, Homo sapiens
RITISGVFTPAWDS

SEQ ID NO: 1405 - protein, 32 aa, Homo sapiens
RFTISRDNSKNTLYLQMNSLRAEDTAVYYCAI

SEQ ID NO: 1406 - protein, 107 aa, Homo sapiens
DIQMTQSPSSLSASVGDRVTITCRASQSISTYLNWYQQKPGKAPKLLIYAASSLQSGVPSRFSGSGSGTDFTLTISSLQPEDFATYFCQQSYSSPFTFGPGTKVDIK

SEQ ID NO: 1407 - protein, 95 aa, Homo sapiens
DIQMTQSPSSLSASVGDRVTITCRASQSISTYLNWYQQKPGKAPKLLIYAASSLQSGVPSRFSGSGSGTDFTLTISSLQPEDFATYFCQQSYSSP

SEQ ID NO: 1408 - protein, 9 aa, Homo sapiens
QQSYSSPFT

SEQ ID NO: 1409 - protein, 32 aa, Homo sapiens
GVPSRFSGSGSGTDFTLTISSLQPEDFATYFC

SEQ ID NO: 1410 - protein, 120 aa, Homo sapiens
QVQLVQSGAEVKKPGASVKVSCKASGYTFTGYFIHWVRQAPGQGLEYMGWINPNSAGTNYAQKFQGRVTMTGDTSISTVYMELSRLRSDDTAMYYCARVFFDWLLPFDYWGQGTLVTVSS

SEQ ID NO: 1411 - protein, 98 aa, Homo sapiens
QVQLVQSGAEVKKPGASVKVSCKASGYTFTGYFIHWVRQAPGQGLEYMGWINPNSAGTNYAQKFQGRVTMTGDTSISTVYMELSRLRSDDTAMYYCAR

SEQ ID NO: 1412 - protein, 5 aa, Homo sapiens
GYFIH

SEQ ID NO: 1413 - protein, 17 aa, Homo sapiens
WINPNSAGTNYAQKFQG

SEQ ID NO: 1414 - protein, 11 aa, Homo sapiens
VFFDWLLPFDY

SEQ ID NO: 1415 - protein, 14 aa, Homo sapiens
WVRQAPGQGLEYMG

SEQ ID NO: 1416 - protein, 32 aa, Homo sapiens
RVTMTGDTSISTVYMELSRLRSDDTAMYYCAR

SEQ ID NO: 1417 - protein, 109 aa, Homo sapiens
QSALTQPASVSGSPGQSITISCTGTSSDVGSYNLVSWYQQHPGKAPKLMIYEVSKRPSGVSNRFSGSKSGNTASLTISGLQAEDEADYYCCSYAGSNYVFGTGTKVTVL

SEQ ID NO: 1418 - protein, 96 aa, Homo sapiens
QSALTQPASVSGSPGQSITISCTGTSSDVGSYNLVSWYQQHPGKAPKLMIYEVSKRPSGVSNRFSGSKSGNTASLTISGLQAEDEADYYCCSYAGS

SEQ ID NO: 1419 - protein, 9 aa, Homo sapiens
CSYAGSNYV

SEQ ID NO: 1420 - protein, 122 aa, Homo sapiens
EVQLLESGGGLVQPGGSLRLSCVASRFTFSDYAMSWVRQPPGKGLEWVSSISGSGGITYYADSVKGRFTISRDNSKNTLYLQIKSLRAEDTAIYYCAKERSNWNYVENFDYWGQGTLVTVSS

SEQ ID NO: 1421 - protein, 98 aa, Homo sapiens
EVQLLESGGGLVQPGGSLRLSCVASRFTFSDYAMSWVRQPPGKGLEWVSSISGSGGITYYADSVKGRFTISRDNSKNTLYLQIKSLRAEDTAIYYCAK

SEQ ID NO: 1422 - protein, 17 aa, Homo sapiens
SISGSGGITYYADSVKG

SEQ ID NO: 1423 - protein, 13 aa, Homo sapiens
ERSNWNYVENFDY

SEQ ID NO: 1424 - protein, 30 aa, Homo sapiens
EVQLLESGGGLVQPGGSLRLSCVASRFTFS

SEQ ID NO: 1425 - protein, 32 aa, Homo sapiens
RFTISRDNSKNTLYLQIKSLRAEDTAIYYCAK

SEQ ID NO: 1426 - protein, 112 aa, Homo sapiens
QTVVTQEPSLTVSPGGTVTLTCASSTGTVTSAFFPNWFQQKPGQAPRALIYSTTNKYSWTPARFSGSLLGGKAALTLSGVQPEDEADYYCLLFYGGARPHVVFGGGTKLTVL

SEQ ID NO: 1427 - protein, 97 aa, Homo sapiens
QTVVTQEPSLTVSPGGTVTLTCASSTGTVTSAFFPNWFQQKPGQAPRALIYSTTNKYSWTPARFSGSLLGGKAALTLSGVQPEDEADYYCLLFYGGA

SEQ ID NO: 1428 - protein, 14 aa, Homo sapiens
ASSTGTVTSAFFPN

SEQ ID NO: 1429 - protein, 7 aa, Homo sapiens
STTNKYS

SEQ ID NO: 1430 - protein, 12 aa, Homo sapiens
LLFYGGARPHVV

SEQ ID NO: 1431 - protein, 22 aa, Homo sapiens
QTVVTQEPSLTVSPGGTVTLTC

SEQ ID NO: 1432 - protein, 15 aa, Homo sapiens
WFQQKPGQAPRALIY

SEQ ID NO: 1433 - protein, 32 aa, Homo sapiens
WTPARFSGSLLGGKAALTLSGVQPEDEADYYC

SEQ ID NO: 1434 - protein, 128 aa, Homo sapiens
QVQLQQWGAGLLKPSETLSLTCAVYGASVSGYFWSWIRQPPGKGLEWIGEINRFGSTNYNPSLKSRVTLSVDTSRNQFSLKLGSVTAADTAMYYCARGSQANPLVRFFDSPVTAFDIWGQGTMVTVSS

SEQ ID NO: 1435 - protein, 98 aa, Homo sapiens
QVQLQQWGAGLLKPSETLSLTCAVYGASVSGYFWSWIRQPPGKGLEWIGEINRFGSTNYNPSLKSRVTLSVDTSRNQFSLKLGSVTAADTAMYYCARG

SEQ ID NO: 1436 - protein, 16 aa, Homo sapiens
EINRFGSTNYNPSLKS

SEQ ID NO: 1437 - protein, 20 aa, Homo sapiens
GSQANPLVRFFDSPVTAFDI

SEQ ID NO: 1438 - protein, 30 aa, Homo sapiens
QVQLQQWGAGLLKPSETLSLTCAVYGASVS

SEQ ID NO: 1439 - protein, 32 aa, Homo sapiens
RVTLSVDTSRNQFSLKLGSVTAADTAMYYCAR

SEQ ID NO: 1440 - protein, 108 aa, Homo sapiens
EIVMTQSPATLSVSPGERATLSCRASQSIKSNLAWYQQKPGQAPRLLIYGASTRATGIPARFSGSGSGTEFTLTISRLQSEDFALYYCQQYDNWPPYTFGQGTKLEIK

SEQ ID NO: 1441 - protein, 96 aa, Homo sapiens
EIVMTQSPATLSVSPGERATLSCRASQSIKSNLAWYQQKPGQAPRLLIYGASTRATGIPARFSGSGSGTEFTLTISRLQSEDFALYYCQQYDNWPP

SEQ ID NO: 1442 - protein, 11 aa, Homo sapiens
RASQSIKSNLA

SEQ ID NO: 1443 - protein, 10 aa, Homo sapiens
QQYDNWPPYT

SEQ ID NO: 1444 - protein, 32 aa, Homo sapiens
GIPARFSGSGSGTEFTLTISRLQSEDFALYYC

SEQ ID NO: 1445 - protein, 119 aa, Homo sapiens
QITLKESGPTLVKPTQTLTLTCTFSGFSFTSSGVGVGWIRQPPGKAMEWLALIYWDDDKRYSPSLKSRLTITKDTSKNQVVLKMTNMDPVDTATYYCARHTVATIVDYWGQGTLVTVSS

SEQ ID NO: 1446 - protein, 98 aa, Homo sapiens
QITLKESGPTLVKPTQTLTLTCTFSGFSFTSSGVGVGWIRQPPGKAMEWLALIYWDDDKRYSPSLKSRLTITKDTSKNQVVLKMTNMDPVDTATYYCA

SEQ ID NO: 1447 - protein, 7 aa, Homo sapiens
SSGVGVG

SEQ ID NO: 1448 - protein, 9 aa, Homo sapiens
HTVATIVDY

SEQ ID NO: 1449 - protein, 30 aa, Homo sapiens
QITLKESGPTLVKPTQTLTLTCTFSGFSFT

SEQ ID NO: 1450 - protein, 14 aa, Homo sapiens
WIRQPPGKAMEWLA

SEQ ID NO: 1451 - protein, 32 aa, Homo sapiens
RLTITKDTSKNQVVLKMTNMDPVDTATYYCAR

SEQ ID NO: 1452 - protein, 111 aa, Homo sapiens
QSALTQPASVSGSPGQSITISCTGTSSDVGGYNYVSWYQQHPGKAPKLMIYEVSNRPSGVPDRFSGSKSGNTASLTISGLQAEDEADYYCGSYTTSSTPVVFGGGTKLTVL

SEQ ID NO: 1453 - protein, 98 aa, Homo sapiens
QSALTQPASVSGSPGQSITISCTGTSSDVGGYNYVSWYQQHPGKAPKLMIYEVSNRPSGVPDRFSGSKSGNTASLTISGLQAEDEADYYCGSYTTSST

SEQ ID NO: 1454 - protein, 11 aa, Homo sapiens
GSYTTSSTPVV

SEQ ID NO: 1455 - protein, 120 aa, Homo sapiens
EVQLVETGGGLIQPGGSLRLSCAASGITVSSNYMNWVRLAPGKGLEWVSLIYSGGSTFYADSVKGRFTISRDNSKNTLYLQMNSLRAEDTAVYYCAREGLVGATTAFDYWGQGTLVTVSS

SEQ ID NO: 1456 - protein, 97 aa, Homo sapiens
EVQLVETGGGLIQPGGSLRLSCAASGITVSSNYMNWVRLAPGKGLEWVSLIYSGGSTFYADSVKGRFTISRDNSKNTLYLQMNSLRAEDTAVYYCAR

SEQ ID NO: 1457 - protein, 5 aa, Homo sapiens
SNYMN

SEQ ID NO: 1458 - protein, 16 aa, Homo sapiens
LIYSGGSTFYADSVKG

SEQ ID NO: 1459 - protein, 12 aa, Homo sapiens
EGLVGATTAFDY

SEQ ID NO: 1460 - protein, 30 aa, Homo sapiens
EVQLVETGGGLIQPGGSLRLSCAASGITVS

SEQ ID NO: 1461 - protein, 14 aa, Homo sapiens
WVRLAPGKGLEWVS

SEQ ID NO: 1462 - protein, 108 aa, Homo sapiens
DIQLTQSPSFLSASVGDRVTITCRASQGISSYLAWYQLQPGKAPKLLIYAASTLQSGVPSRFSGSGSGTEFTLTISSLQPEDFATYYCQQLNGHPQGTFGQGTKVEIK

SEQ ID NO: 1463 - protein, 95 aa, Homo sapiens
DIQLTQSPSFLSASVGDRVTITCRASQGISSYLAWYQLQPGKAPKLLIYAASTLQSGVPSRFSGSGSGTEFTLTISSLQPEDFATYYCQQLNGHP

SEQ ID NO: 1464 - protein, 11 aa, Homo sapiens
RASQGISSYLA

SEQ ID NO: 1465 - protein, 7 aa, Homo sapiens
AASTLQS

SEQ ID NO: 1466 - protein, 10 aa, Homo sapiens
QQLNGHPQGT

SEQ ID NO: 1467 - protein, 23 aa, Homo sapiens
DIQLTQSPSFLSASVGDRVTITC

SEQ ID NO: 1468 - protein, 15 aa, Homo sapiens
WYQLQPGKAPKLLIY

SEQ ID NO: 1469 - protein, 32 aa, Homo sapiens
GVPSRFSGSGSGTEFTLTISSLQPEDFATYYC

SEQ ID NO: 1470 - protein, 122 aa, Homo sapiens
QVTLRESGPALVKPTQTLTLTCTFSGFSLTTSGMCVSWIRQPPGKALEWLARIDWDDDKYYSTSLKARLTISKDTSKNQVVLTMTNMDPVDTATYYCARTSVGGTKYYFDYWGQGTLVTVSS

SEQ ID NO: 1471 - protein, 99 aa, Homo sapiens
QVTLRESGPALVKPTQTLTLTCTFSGFSLTTSGMCVSWIRQPPGKALEWLARIDWDDDKYYSTSLKARLTISKDTSKNQVVLTMTNMDPVDTATYYCAR

SEQ ID NO: 1472 - protein, 7 aa, Homo sapiens
TSGMCVS

SEQ ID NO: 1473 - protein, 16 aa, Homo sapiens
RIDWDDDKYYSTSLKA

SEQ ID NO: 1474 - protein, 12 aa, Homo sapiens
TSVGGTKYYFDY

SEQ ID NO: 1475 - protein, 30 aa, Homo sapiens
QVTLRESGPALVKPTQTLTLTCTFSGFSLT

SEQ ID NO: 1476 - protein, 110 aa, Homo sapiens
QSVLTQPPSASGTPGQRVTISCSGSSSNIGRNTVNWYQQLPGTAPKLLIYSNNQRPSGVPDRFSGSKSGTSASLAISGLQSEDEADYYCAAWDDSLNGGVFGGGTKLTVL

SEQ ID NO: 1477 - protein, 98 aa, Homo sapiens
QSVLTQPPSASGTPGQRVTISCSGSSSNIGRNTVNWYQQLPGTAPKLLIYSNNQRPSGVPDRFSGSKSGTSASLAISGLQSEDEADYYCAAWDDSLNG

SEQ ID NO: 1478 - protein, 13 aa, Homo sapiens
SGSSSNIGRNTVN

SEQ ID NO: 1479 - protein, 11 aa, Homo sapiens
AAWDDSLNGGV

SEQ ID NO: 1480 - protein, 128 aa, Homo sapiens
QLQLQESGPGLVKPSEALSLTCTVSGGSISTSNYYWGWIRQPPGKGLEWIGSIYYRGGTHYNPSLKTRVTISVDTSKNQFSLKLSSVTAADTAVYYCARHTYFYDIVGAAVWEPFDIWGQGTMVTVSS

SEQ ID NO: 1481 - protein, 99 aa, Homo sapiens
QLQLQESGPGLVKPSEALSLTCTVSGGSISTSNYYWGWIRQPPGKGLEWIGSIYYRGGTHYNPSLKTRVTISVDTSKNQFSLKLSSVTAADTAVYYCAR

SEQ ID NO: 1482 - protein, 7 aa, Homo sapiens
TSNYYWG

SEQ ID NO: 1483 - protein, 16 aa, Homo sapiens
SIYYRGGTHYNPSLKT

SEQ ID NO: 1484 - protein, 18 aa, Homo sapiens
HTYFYDIVGAAVWEPFDI

SEQ ID NO: 1485 - protein, 30 aa, Homo sapiens
QLQLQESGPGLVKPSEALSLTCTVSGGSIS

SEQ ID NO: 1486 - protein, 109 aa, Homo sapiens
EIVLTQSPGTLSLSPGERATLSCRASQSVSSSYLAWYQQKPGQAPRLLISDASSRATGIPDRFSGSGSGTDFTLTISRLEPEDFAVYYCQQYGSSPPWTFGQGTKVEIK

SEQ ID NO: 1487 - protein, 97 aa, Homo sapiens
EIVLTQSPGTLSLSPGERATLSCRASQSVSSSYLAWYQQKPGQAPRLLISDASSRATGIPDRFSGSGSGTDFTLTISRLEPEDFAVYYCQQYGSSPP

SEQ ID NO: 1488 - protein, 10 aa, Homo sapiens
QQYGSSPPWT

SEQ ID NO: 1489 - protein, 15 aa, Homo sapiens
WYQQKPGQAPRLLIS

SEQ ID NO: 1490 - protein, 129 aa, Homo sapiens
QLQLQESGPGLVKPSETLSLTCTVSGGSISSNNYYWGWIRQPPGKGLEWIGSIYYSGSTYYNPSLKSRVTMSVDTSKNQFSLKLSSVTAADTAVYHCARQGPNYYDRSGYYYVGPFDIWGQGTMVTVSS

SEQ ID NO: 1491 - protein, 99 aa, Homo sapiens
QLQLQESGPGLVKPSETLSLTCTVSGGSISSNNYYWGWIRQPPGKGLEWIGSIYYSGSTYYNPSLKSRVTMSVDTSKNQFSLKLSSVTAADTAVYHCAR

SEQ ID NO: 1492 - protein, 7 aa, Homo sapiens
SNNYYWG

SEQ ID NO: 1493 - protein, 19 aa, Homo sapiens
QGPNYYDRSGYYYVGPFDI

SEQ ID NO: 1494 - protein, 32 aa, Homo sapiens
RVTMSVDTSKNQFSLKLSSVTAADTAVYHCAR

SEQ ID NO: 1495 - protein, 109 aa, Homo sapiens
QSVLTQPPSVSAAPGQKVTISCSGSSSNIGNNSVSWYQHLPGTAPKLLIYENNERPSGIPDRFSGSKSGTSATLGITGLQTGDEADYYCETWDRSLSASFGTGTKVTVL

SEQ ID NO: 1496 - protein, 98 aa, Homo sapiens
QSVLTQPPSVSAAPGQKVTISCSGSSSNIGNNSVSWYQHLPGTAPKLLIYENNERPSGIPDRFSGSKSGTSATLGITGLQTGDEADYYCETWDRSLSA

SEQ ID NO: 1497 - protein, 13 aa, Homo sapiens
SGSSSNIGNNSVS

SEQ ID NO: 1498 - protein, 7 aa, Homo sapiens
ENNERPS

SEQ ID NO: 1499 - protein, 10 aa, Homo sapiens
ETWDRSLSAS

SEQ ID NO: 1500 - protein, 22 aa, Homo sapiens
QSVLTQPPSVSAAPGQKVTISC

SEQ ID NO: 1501 - protein, 15 aa, Homo sapiens
WYQHLPGTAPKLLIY

SEQ ID NO: 1502 - protein, 32 aa, Homo sapiens
GIPDRFSGSKSGTSATLGITGLQTGDEADYYC

SEQ ID NO: 1503 - protein, 125 aa, Homo sapiens
QVQLVQSGAEVKKPGASVKVSCRVSGYTFTGYYIHWVRQAPGQGLEWMGWINPNSGGTNYAQKFQGRVTMTRDTSITTAYMELSRLRSDDTAVYYCARVPMILVVDHWGSYFDYWGQGTLVTVSS

SEQ ID NO: 1504 - protein, 98 aa, Homo sapiens
QVQLVQSGAEVKKPGASVKVSCRVSGYTFTGYYIHWVRQAPGQGLEWMGWINPNSGGTNYAQKFQGRVTMTRDTSITTAYMELSRLRSDDTAVYYCAR

SEQ ID NO: 1505 - protein, 5 aa, Homo sapiens
GYYIH

SEQ ID NO: 1506 - protein, 16 aa, Homo sapiens
VPMILVVDHWGSYFDY

SEQ ID NO: 1507 - protein, 30 aa, Homo sapiens
QVQLVQSGAEVKKPGASVKVSCRVSGYTFT

SEQ ID NO: 1508 - protein, 32 aa, Homo sapiens
RVTMTRDTSITTAYMELSRLRSDDTAVYYCAR

SEQ ID NO: 1509 - protein, 110 aa, Homo sapiens
QSALTQPASVSGSPGQSITISCTGTSSDVGGYNYVSWYQQYPGKAPKLMIYDVSKRPSGVSNRFSGSKSGNTASLTISGLQAEDEADYYCCSYAGSSALVFGGGTKLTVL

SEQ ID NO: 1510 - protein, 98 aa, Homo sapiens
QSALTQPASVSGSPGQSITISCTGTSSDVGGYNYVSWYQQYPGKAPKLMIYDVSKRPSGVSNRFSGSKSGNTASLTISGLQAEDEADYYCCSYAGSSA

SEQ ID NO: 1511 - protein, 10 aa, Homo sapiens
CSYAGSSALV

SEQ ID NO: 1512 - protein, 15 aa, Homo sapiens
WYQQYPGKAPKLMIY

SEQ ID NO: 1513 - protein, 122 aa, Homo sapiens
QITLKESGPTLVKPTQTLTLTCTLSGFSLSTSGVSVGWIRQPPGKALEWLAVIFWDDDKRYNPSLKSRLTIAKDTSKSQVVLTMTNLDPVDTGTYYCVSGSSYYYYYYMDVWGKGTTVTVSS

SEQ ID NO: 1514 - protein, 98 aa, Homo sapiens
QITLKESGPTLVKPTQTLTLTCTLSGFSLSTSGVSVGWIRQPPGKALEWLAVIFWDDDKRYNPSLKSRLTIAKDTSKSQVVLTMTNLDPVDTGTYYCV

SEQ ID NO: 1515 - protein, 7 aa, Homo sapiens
TSGVSVG

SEQ ID NO: 1516 - protein, 16 aa, Homo sapiens
VIFWDDDKRYNPSLKS

SEQ ID NO: 1517 - protein, 12 aa, Homo sapiens
GSSYYYYYYMDV

SEQ ID NO: 1518 - protein, 30 aa, Homo sapiens
QITLKESGPTLVKPTQTLTLTCTLSGFSLS

SEQ ID NO: 1519 - protein, 32 aa, Homo sapiens
RLTIAKDTSKSQVVLTMTNLDPVDTGTYYCVS

SEQ ID NO: 1520 - protein, 107 aa, Homo sapiens
DIQMTQSPSSVSASIGDRVTITCRASQDISTWLAWYQQKPGRAPNLLIYGASSLQSGVPSRFSGSGSGTDFTLTISSLQPEDFATYYCQQATSFPLTFGGGTKVEIK

SEQ ID NO: 1521 - protein, 95 aa, Homo sapiens
DIQMTQSPSSVSASIGDRVTITCRASQDISTWLAWYQQKPGRAPNLLIYGASSLQSGVPSRFSGSGSGTDFTLTISSLQPEDFATYYCQQATSFP

SEQ ID NO: 1522 - protein, 11 aa, Homo sapiens
RASQDISTWLA

SEQ ID NO: 1523 - protein, 7 aa, Homo sapiens
GASSLQS

SEQ ID NO: 1524 - protein, 9 aa, Homo sapiens
QQATSFPLT

SEQ ID NO: 1525 - protein, 23 aa, Homo sapiens
DIQMTQSPSSVSASIGDRVTITC

SEQ ID NO: 1526 - protein, 15 aa, Homo sapiens
WYQQKPGRAPNLLIY

SEQ ID NO: 1527 - protein, 133 aa, Homo sapiens
QVQLQESGPGLVKPSQTLSLTCSVSGGSISSGGYYWSWIRQHPGKGLEWIGYMYYSGSTYYNPSLKSRVTIFVDTSKNHFSLKLTSVTAADTAVYYCARDSYENYYGSGSLEPNYHHYNMDVWGQGTTVTVSS

SEQ ID NO: 1528 - protein, 99 aa, Homo sapiens
QVQLQESGPGLVKPSQTLSLTCSVSGGSISSGGYYWSWIRQHPGKGLEWIGYMYYSGSTYYNPSLKSRVTIFVDTSKNHFSLKLTSVTAADTAVYYCAR

SEQ ID NO: 1529 - protein, 16 aa, Homo sapiens
YMYYSGSTYYNPSLKS

SEQ ID NO: 1530 - protein, 23 aa, Homo sapiens
DSYENYYGSGSLEPNYHHYNMDV

SEQ ID NO: 1531 - protein, 30 aa, Homo sapiens
QVQLQESGPGLVKPSQTLSLTCSVSGGSIS

SEQ ID NO: 1532 - protein, 32 aa, Homo sapiens
RVTIFVDTSKNHFSLKLTSVTAADTAVYYCAR

SEQ ID NO: 1533 - protein, 106 aa, Homo sapiens
DVQMTQSPSTLSASIGDRVTITCRASQSISGWLAWYQQRPGKAPKLLIYRASSLDFGVPSRFSGNGSGTEFTLTISSLQPDDFATYYCQQYHTYRTFGQGTKVEVK

SEQ ID NO: 1534 - protein, 94 aa, Homo sapiens
DVQMTQSPSTLSASIGDRVTITCRASQSISGWLAWYQQRPGKAPKLLIYRASSLDFGVPSRFSGNGSGTEFTLTISSLQPDDFATYYCQQYHTY

SEQ ID NO: 1535 - protein, 11 aa, Homo sapiens
RASQSISGWLA

SEQ ID NO: 1536 - protein, 7 aa, Homo sapiens
RASSLDF

SEQ ID NO: 1537 - protein, 8 aa, Homo sapiens
QQYHTYRT

SEQ ID NO: 1538 - protein, 23 aa, Homo sapiens
DVQMTQSPSTLSASIGDRVTITC

SEQ ID NO: 1539 - protein, 32 aa, Homo sapiens
GVPSRFSGNGSGTEFTLTISSLQPDDFATYYC

SEQ ID NO: 1540 - protein, 10 aa, Homo sapiens
FGQGTKVEVK

SEQ ID NO: 1541 - protein, 120 aa, Homo sapiens
EVQLVESGGGLIQPGGSLRLSCAASGFTVSSNYMSWVRQAPGKGLEWVSVIYSGGSTYYADSVKGRFTISRDNSKNTLYLQMNSLRAEDTAVYYCARTPRGSRRGAFDIWGQGTMVTVSS

SEQ ID NO: 1542 - protein, 97 aa, Homo sapiens
EVQLVESGGGLIQPGGSLRLSCAASGFTVSSNYMSWVRQAPGKGLEWVSVIYSGGSTYYADSVKGRFTISRDNSKNTLYLQMNSLRAEDTAVYYCAR

SEQ ID NO: 1543 - protein, 12 aa, Homo sapiens
TPRGSRRGAFDI

SEQ ID NO: 1544 - protein, 30 aa, Homo sapiens
EVQLVESGGGLIQPGGSLRLSCAASGFTVS

SEQ ID NO: 1545 - protein, 108 aa, Homo sapiens
DIQMTQSPSSLSASVGDRVTITCQASQDISDYLNWYQQKPGKAPKLLIYDASNLETGVPSRFSGSGSGTDFTFTISSLQPEDIATYYCQQYDNLPPLTFGGGTKVEIK

SEQ ID NO: 1546 - protein, 96 aa, Homo sapiens
DIQMTQSPSSLSASVGDRVTITCQASQDISDYLNWYQQKPGKAPKLLIYDASNLETGVPSRFSGSGSGTDFTFTISSLQPEDIATYYCQQYDNLPP

SEQ ID NO: 1547 - protein, 11 aa, Homo sapiens
QASQDISDYLN

SEQ ID NO: 1548 - protein, 10 aa, Homo sapiens
QQYDNLPPLT

SEQ ID NO: 1549 - protein, 126 aa, Homo sapiens
QVQLVQSGAEVKKPGASVKVSCKTSGYTFTGFYLHWLRQAPGQGLEWMGRINPNTGDTDYAQKFQGRVTMTRDTSISTAYMELSRLRADDTAVYYCARTPGQTRQLFVGTNVLDVWGQGTMVTVSS

SEQ ID NO: 1550 - protein, 98 aa, Homo sapiens
QVQLVQSGAEVKKPGASVKVSCKTSGYTFTGFYLHWLRQAPGQGLEWMGRINPNTGDTDYAQKFQGRVTMTRDTSISTAYMELSRLRADDTAVYYCAR

SEQ ID NO: 1551 - protein, 5 aa, Homo sapiens
GFYLH

SEQ ID NO: 1552 - protein, 17 aa, Homo sapiens
RINPNTGDTDYAQKFQG

SEQ ID NO: 1553 - protein, 17 aa, Homo sapiens
TPGQTRQLFVGTNVLDV

SEQ ID NO: 1554 - protein, 14 aa, Homo sapiens
WLRQAPGQGLEWMG

SEQ ID NO: 1555 - protein, 32 aa, Homo sapiens
RVTMTRDTSISTAYMELSRLRADDTAVYYCAR

SEQ ID NO: 1556 - protein, 107 aa, Homo sapiens
DIQMTQSPSSVSASVGDRVTITCRASQGISSWLAWYQQKPGKAPKVLIFAASSLQSGVPSRFSGSGSGTDFTLTITSLQPEDFATYFCQQTNSFPPTFGGGTKVEIK

SEQ ID NO: 1557 - protein, 96 aa, Homo sapiens
DIQMTQSPSSVSASVGDRVTITCRASQGISSWLAWYQQKPGKAPKVLIFAASSLQSGVPSRFSGSGSGTDFTLTITSLQPEDFATYFCQQTNSFPP

SEQ ID NO: 1558 - protein, 11 aa, Homo sapiens
RASQGISSWLA

SEQ ID NO: 1559 - protein, 9 aa, Homo sapiens
QQTNSFPPT

SEQ ID NO: 1560 - protein, 23 aa, Homo sapiens
DIQMTQSPSSVSASVGDRVTITC

SEQ ID NO: 1561 - protein, 15 aa, Homo sapiens
WYQQKPGKAPKVLIF

SEQ ID NO: 1562 - protein, 32 aa, Homo sapiens
GVPSRFSGSGSGTDFTLTITSLQPEDFATYFC

SEQ ID NO: 1563 - protein, 118 aa, Homo sapiens
EVQLVESGGGLVQPGGSLRLSCAASGLLVSRNYMNWVRQAPGKGLEWVSIIYSGGSTFYADSVEGRFTISRDESKNTLYLQMNSLRTDDTAVYYCARDLSDYGGIDCWGQGTLVTVSS

SEQ ID NO: 1564 - protein, 97 aa, Homo sapiens
EVQLVESGGGLVQPGGSLRLSCAASGLLVSRNYMNWVRQAPGKGLEWVSIIYSGGSTFYADSVEGRFTISRDESKNTLYLQMNSLRTDDTAVYYCAR

SEQ ID NO: 1565 - protein, 5 aa, Homo sapiens
RNYMN

SEQ ID NO: 1566 - protein, 16 aa, Homo sapiens
IIYSGGSTFYADSVEG

SEQ ID NO: 1567 - protein, 10 aa, Homo sapiens
DLSDYGGIDC

SEQ ID NO: 1568 - protein, 30 aa, Homo sapiens
EVQLVESGGGLVQPGGSLRLSCAASGLLVS

SEQ ID NO: 1569 - protein, 32 aa, Homo sapiens
RFTISRDESKNTLYLQMNSLRTDDTAVYYCAR

SEQ ID NO: 1570 - protein, 105 aa, Homo sapiens
YELTQPLSVSMALGQTARISCGGDNVGSQNVHWYQQRPGQAPVLVIYRDSNRPSGIPERFSGSKSGNTATLTISRAQAGDEADYYCQVWDSSTVAFGGGTKLTVL

SEQ ID NO: 1571 - protein, 93 aa, Homo sapiens
YELTQPLSVSMALGQTARISCGGDNVGSQNVHWYQQRPGQAPVLVIYRDSNRPSGIPERFSGSKSGNTATLTISRAQAGDEADYYCQVWDSST

SEQ ID NO: 1572 - protein, 11 aa, Homo sapiens
GGDNVGSQNVH

SEQ ID NO: 1573 - protein, 7 aa, Homo sapiens
RDSNRPS

SEQ ID NO: 1574 - protein, 9 aa, Homo sapiens
QVWDSSTVA

SEQ ID NO: 1575 - protein, 21 aa, Homo sapiens
YELTQPLSVSMALGQTARISC

SEQ ID NO: 1576 - protein, 32 aa, Homo sapiens
GIPERFSGSKSGNTATLTISRAQAGDEADYYC

SEQ ID NO: 1577 - protein, 122 aa, Homo sapiens
QVQLQESGPGLVKPSGTLSLTCAVSGGSISNNNWWIWVRQPPGKGLEWIGEIHHSGSTDYNPSLKSRVTISIDKSKNQFSLRLSSVTAADTAVYYCARKPEPYYYYYYMDVWGKGTTVTVSS

SEQ ID NO: 1578 - protein, 98 aa, Homo sapiens
QVQLQESGPGLVKPSGTLSLTCAVSGGSISNNNWWIWVRQPPGKGLEWIGEIHHSGSTDYNPSLKSRVTISIDKSKNQFSLRLSSVTAADTAVYYCAR

SEQ ID NO: 1579 - protein, 6 aa, Homo sapiens
NNNWWI

SEQ ID NO: 1580 - protein, 16 aa, Homo sapiens
EIHHSGSTDYNPSLKS

SEQ ID NO: 1581 - protein, 13 aa, Homo sapiens
KPEPYYYYYYMDV

SEQ ID NO: 1582 - protein, 32 aa, Homo sapiens
RVTISIDKSKNQFSLRLSSVTAADTAVYYCAR

SEQ ID NO: 1583 - protein, 109 aa, Homo sapiens
ETVLTQSPGTLSLSPGERATLSCRASQSVSSSYITWYQQKPGQAPRLLIYGASSRATGIPDRFSGSGSGTDFTLTISRLEPEDFAVYYCQQYRSPWGLTFGPGTKVDIK

SEQ ID NO: 1584 - protein, 94 aa, Homo sapiens
ETVLTQSPGTLSLSPGERATLSCRASQSVSSSYITWYQQKPGQAPRLLIYGASSRATGIPDRFSGSGSGTDFTLTISRLEPEDFAVYYCQQYRS

SEQ ID NO: 1585 - protein, 12 aa, Homo sapiens
RASQSVSSSYIT

SEQ ID NO: 1586 - protein, 10 aa, Homo sapiens
QQYRSPWGLT

SEQ ID NO: 1587 - protein, 23 aa, Homo sapiens
ETVLTQSPGTLSLSPGERATLSC

SEQ ID NO: 1588 - protein, 124 aa, Homo sapiens
QVQLVQSGAEVVKPGSSVKVSCKASGGTFTRYAISWVRQAPGQGPEWMGRIIPMFGIANYAQRFQGRVTMTADKSTSTAYMELSSLRSEDTAVYYCATCQYYYDSSGYGSLDYWGQGTQVTVSS

SEQ ID NO: 1589 - protein, 97 aa, Homo sapiens
QVQLVQSGAEVVKPGSSVKVSCKASGGTFTRYAISWVRQAPGQGPEWMGRIIPMFGIANYAQRFQGRVTMTADKSTSTAYMELSSLRSEDTAVYYCA

SEQ ID NO: 1590 - protein, 5 aa, Homo sapiens
RYAIS

SEQ ID NO: 1591 - protein, 17 aa, Homo sapiens
RIIPMFGIANYAQRFQG

SEQ ID NO: 1592 - protein, 15 aa, Homo sapiens
CQYYYDSSGYGSLDY

SEQ ID NO: 1593 - protein, 30 aa, Homo sapiens
QVQLVQSGAEVVKPGSSVKVSCKASGGTFT

SEQ ID NO: 1594 - protein, 14 aa, Homo sapiens
WVRQAPGQGPEWMG

SEQ ID NO: 1595 - protein, 32 aa, Homo sapiens
RVTMTADKSTSTAYMELSSLRSEDTAVYYCAT

SEQ ID NO: 1596 - protein, 11 aa, Homo sapiens
WGQGTQVTVSS

SEQ ID NO: 1597 - protein, 108 aa, Homo sapiens
EIVLTQSPGTLSLSPGERVTLSCRASQSISSNFLAWYQQKPGQAPRLLISGASSRATGIPDRFSGGGSGTDFTLTISRLEPEDFAVYYCQQYHSSPRTFGQGTKVEIK

SEQ ID NO: 1598 - protein, 96 aa, Homo sapiens
EIVLTQSPGTLSLSPGERVTLSCRASQSISSNFLAWYQQKPGQAPRLLISGASSRATGIPDRFSGGGSGTDFTLTISRLEPEDFAVYYCQQYHSSP

SEQ ID NO: 1599 - protein, 12 aa, Homo sapiens
RASQSISSNFLA

SEQ ID NO: 1600 - protein, 9 aa, Homo sapiens
QQYHSSPRT

SEQ ID NO: 1601 - protein, 23 aa, Homo sapiens
EIVLTQSPGTLSLSPGERVTLSC

SEQ ID NO: 1602 - protein, 32 aa, Homo sapiens
GIPDRFSGGGSGTDFTLTISRLEPEDFAVYYC

SEQ ID NO: 1603 - DNA, 255 bp, Homo sapiens
  source 1..255: mol_type = other DNA
caggtgcagctgcaggagtcgggcccaggactggtgaggccttcggagaccctgtccctcacctgcactgtctctggtggctccatcagtagtcactactggagctggatccggcagccccccgggaagggactggagtggattgggtatatctattatagtgggagcaccaattacaacccctccctcaagagtcgagtcaccatatcagtagacacgtccaagaaccagttctccctgaaacttatctctgtg

SEQ ID NO: 1604 - DNA, 255 bp, Homo sapiens
  source 1..255: mol_type = other DNA
tcctatgtgctgactcagccaccctcggtgtcagtggccccaggacagacggccaggattacctgtgggggaaacaacattggaagtaaaagtgtgcactggtaccagcagaagccaggccaggcccctgtgctggtcgtctatgatgatagcgaccggccctcagggatccctgagcgattctctggctccaactctgggaacacggccaccctgaccatcagcagggtcgaagccggggatgaggccgactat

SEQ ID NO: 1605 - DNA, 255 bp, Homo sapiens
  source 1..255: mol_type = other DNA
caggtgcagctgcaggagtcgggcccaggactggtgaagccttcggagaccctgtccctcacctgcactgtctctggtggctccatcagtagtttctactggggctggatccggcagcccgccgggaagggactggagtggattgggcgtttccatactagtgggagcaccaactacaacccctccttcaagagtcgagtcaccatgtcagtagacacgtccaagaaccagttctccctgaagctgacctctgtg

SEQ ID NO: 1606 - DNA, 255 bp, Homo sapiens
  source 1..255: mol_type = other DNA
gacatcgtgatgacccagtctccagactccctggctgtgtctctgggcgagagggccaccatcaactgcaagtccagccagactgttttatacagctccaacaataagaactacttagcttggtaccagcagaaaccaggacagcctcctaagttgctcatttactgggcatctacccgggaatccggggtccctgaccgattcagtggcagcgggtctgggacagatttcactctcaccatcagcagcctgcag

SEQ ID NO: 1607 - DNA, 255 bp, Homo sapiens
  source 1..255: mol_type = other DNA
caggtccaactcatacagtcaggggctgaggtgaagaagcctggggcctcagtgaaggtctcctgcacggcctccggatactccctcaatgagttgcccatacagtgggtgcggcaggctcctggtaaagggcttgagtggatgggagaatttgatcccgaagatggtgaaacaatctacgcagagaaattccagggcagagtcaccctgaccgaggaaacatctacaaacacagcctacatggagttgagcagc

SEQ ID NO: 1608 - DNA, 255 bp, Homo sapiens
  source 1..255: mol_type = other DNA
gaaattgtgttgacgcagtccccaggcaccctgtctttgtctccaggggaaagagccaccctctcctgcagggccagtcaggatattaccaacaacttcttagcctggtaccagcagaaagccggccaggctcccaaactcttcatctatggtgcatccaggagggcccctggcatcccacacaggttcagtggcagtgggtctgggacagacttcactctcaccatcagcagcctggagcctgaagattttgca

SEQ ID NO: 1609 - DNA, 255 bp, Homo sapiens
  source 1..255: mol_type = other DNA
caggtgcagctgcaggagtcgggcccaggactggtgaagccttcggagaccctgtccctcacctgcactgtctctggtggctccatcagtagttactactggagctggatccggcagcccgccgggaagggactggagtggattgggcgtatctataccagtgggagcaccaactacaacccctccctcaagagtcgagtcaccatgtcagtagacacgtccaagaaccagttctccctgaagctgagctctgtg

SEQ ID NO: 1610 - DNA, 255 bp, Homo sapiens
  source 1..255: mol_type = other DNA
cagtctgccctgactcagcctgcctccgtgtctgggtctcctggacagtcgatcaccatctcctgcactggaaccagcagtgacgttggtggttataactatgtctcctggtaccaacagcacccaggcaaagcccccaaactcatgatttatgatgtcagtaatcggccctcaggggtttctaatcgcttctctggctccaagtctggcaacacggcctccctgaccatctctgggctccaggctgaggacgag

SEQ ID NO: 1611 - DNA, 255 bp, Homo sapiens
  source 1..255: mol_type = other DNA
caggtgcagctgcaggagtcgggcccaggactggtgaagccttcacagaccctgtccctcacctgcactgtctctggtggctccatcaacagtggtgattactactggagctggatccgccagcccccagggaagggcctggagtggattgggtacatctatttcagtgggagcacctactacaacccgtccctcaagagtcgagttaccatatcactagacaggtccaagaaccagttctccctgaagctgagc

SEQ ID NO: 1612 - DNA, 255 bp, Homo sapiens
  source 1..255: mol_type = other DNA
gatattgtgatgacccagactccactctcctcacctgtcacccttggacagccggcctccatctcctgcaggtctagtcaaagcctcgtacacagtgatggagacacctacttgagttggcttcagcagaggccaggccagcctccaagactcctaatttacaagatttctaaccggttctctggggtcccagacagattcagtggcagtggggcagggacagatttcacactgaaaatcagcagggtggaagct

SEQ ID NO: 1613 - DNA, 255 bp, Homo sapiens
  source 1..255: mol_type = other DNA
caggtgcagctgcaggagtcgggcccaggactggtgaagccttcggagaccctgtccctcacctgcactgtctctggtggctccatcagtagtcactactggagctggatccggcagcccccagggaagggactggagcagattgggtatatgtattacagtgggagcaccaactacaacccctccctcaagagtcgagtcatcatatcagtagacacgtccaagaaccagttctccctgaagttgagctctgtg

SEQ ID NO: 1614 - DNA, 255 bp, Homo sapiens
  source 1..255: mol_type = other DNA
cagtctgccctgactcagcctccctccgcgtccgggtctcctggacagtcagtcaccatctcctgcactggaaccagcagtgacgttggtggttataactatgtctcctggtaccaacagcacccaggcaaagcccccaaactcatgatttatgaggtcagtaagcggccctcaggggtccctgatcgctactctggctccaagtctggcaacacggcctccctgaccgtctctgggctccaggctgaggatgag

SEQ ID NO: 1615 - DNA, 255 bp, Homo sapiens
  source 1..255: mol_type = other DNA
gaagtgcagctggtggagtctgggggaggcttggtacagcctggcaggtccctgagactctcctgtgcagcctctggattcacctttggtgactatgccatgtactgggtccggcaacctccagggaagggcctggagtgggtctcaggtattagttggaatagaggtactataggctatgcggactctgtgaagggccgattcaccatctccagagacaacgccaagaactccctgtatctgcaaatgaacagt

SEQ ID NO: 1616 - DNA, 255 bp, Homo sapiens
  source 1..255: mol_type = other DNA
cagtctgccctgactcagcctgcctccgtgtctgggtctcctggacagtcgatcaccatctcctgcactggaaccagcagtgacgttggtggttataactatgtctcctggtaccaacaacacccaggcaaagcccccaaactcatgatttatgatgtcagtaatcggccctcaggggtttctaatcgcttctctggctccaagtctggcaacacggcctccctgaccatctctgggctccaggctgaggacgag

SEQ ID NO: 1617 - DNA, 255 bp, Homo sapiens
  source 1..255: mol_type = other DNA
caggtgcagctgcaggagtcgggcccaggactggtgaagccttcggagaccctgtccctcacctgcactgtctctggtggctccatcactagttactactggagctggatccggcagcccccagggaagggactggagtggattgaatatatccattacagtgggagcaccaactacaacccctccctcaagagtcgagtcaccatatcagtagacacgtccaagaaccagttctccctgaagctgagctctgtg

SEQ ID NO: 1618 - DNA, 255 bp, Homo sapiens
  source 1..255: mol_type = other DNA
cagtctgtgctgactcagccaccctcagcgtctgggacccccgggcagagggtcaccatctcttgttctggaagcagctccaacatcggaggtaatcctgtaaactggtaccagcagctcccaggaacggcccccaaactcctcatctatagtaataatcagcggccctcaggggtccctgaccgattctctggctccaagtctggcacctcagcctccctggccatcagtgggctccagtctgaggatgaggct

SEQ ID NO: 1619 - DNA, 255 bp, Homo sapiens
  source 1..255: mol_type = other DNA
gaggtgcagctggtggagtctgggggaggcttggtacagccgggggggtccctgagactctcctgtgcagcctctggattcaccctcagcagctatagcatgaactgggtccgccaggctccagggaaggggctggagtgggtttcatacattagtagtagtagtagcaccatatactacgcagactctgtgaagggccgattcaccatctccaaagacaacgccaagaactcactgtatctgcaaatgaacagc

SEQ ID NO: 1620 - DNA, 255 bp, Homo sapiens
  source 1..255: mol_type = other DNA
gaaattgtgttgacgcagtctccaggcaccctgtctttgtctccaggggaaagagccaccctctcctgcagggccagtcagagtgttagcagcggttacttagcctggtaccagcaaaaacctggccaggctcccaggctcctcatctttggtgcatccagcagggccactggcatcccagacaggttcagtggcagtgggtctgggacagacttcactctcaccatcaacagactggagcctgaagattttgca

SEQ ID NO: 1621 - DNA, 255 bp, Homo sapiens
  source 1..255: mol_type = other DNA
caggtgcagctggtggagtctgggggaggcgtggtccagcctgggaggtccctgagactctcctgtgcagcctctggattcaccttcagtagctatggcatgcactgggtccgccaggctccaggcaaggggctggagtgggtggcagttatatggtatgatggaagtaataaatattatgcagactccgtgaagggccgattcaccatctccagagacaattccaagaacacgctgtatctgcaaatgaacagc

SEQ ID NO: 1622 - DNA, 255 bp, Homo sapiens
  source 1..255: mol_type = other DNA
cagtctgccctgactcagcctgcctccgtgtctgggtctcctggacagtcgatcaccatctcctgcactggaaccaccagtgacgttggtggttatgactatgtctcctggtaccaacagcacccaggcaaagcccccaaactcatactttctgaggtcagtaatcggccctcaggggtttctaatcgcttctctggctccaagtctggcaacacggcctccctgaccatctctgggctccaggctgaggacgag

SEQ ID NO: 1623 - DNA, 255 bp, Homo sapiens
  source 1..255: mol_type = other DNA
caggtccacctggtgcagtctggggctgaggtgaagaagcctgggtcctcggtgaaggtctcctgcaaggcttctggaggcaccttcagcagctgtgctatcagctgggtgcgacaggcccctggacaagggcttgagtggatgggaaggatcatccctatccttggtatagcaaactacgcacagaagttccagggcagagtcacgattaccgcggacaaatccacgagcacagcctacatggagctgagcagc

SEQ ID NO: 1624 - DNA, 255 bp, Homo sapiens
  source 1..255: mol_type = other DNA
cagtctgccctgactcagcctgcctccgtgtctgggtctcctggacagtcgatcaccatctcctgcactggaaccagcagtgacgttggtggttataactatgtctcctggtaccaacagcacccaggcaaagcccccaaactcatgatttatgaggtcactaatcggccctcaggggtttctaatcgcttctctggctccaggtctggcaacacggcctccctgaccatctctgggctccaggctgaggacgag

SEQ ID NO: 1625 - DNA, 255 bp, Homo sapiens
  source 1..255: mol_type = other DNA
gaagtgcagctggtgcagtctggagcagaggtgaaaaagcccggggagtctctgaggatctcctgtaagggttctggatacagctttagcagctactggatcagctgggtgcgccagatgcccgggaaaggcctggagtggatggggaggattgatcctagtgactctaacaccaactacagcccgtccttccaaggccacgtcaccatctcagctgacaagtccatcagcactgcctacctgcagtggagcagc

SEQ ID NO: 1626 - DNA, 255 bp, Homo sapiens
  source 1..255: mol_type = other DNA
gaaattgtgttgacacagtctccagccaccctgtctttgtctccaggggaaagagccaccctctcctgcagggccagtcagagtgttagcagctacctagcctggtaccaacagaaacctggccaggctcccaggctcctcatctatgatgcatccaacagggcctctggcatcccagccaggttcagtggcagtgggtcagggacagacttcactctcaccatcagcagcctagagcctgaagattttgcagtt

SEQ ID NO: 1627 - DNA, 255 bp, Homo sapiens
  source 1..255: mol_type = other DNA
caggtgcagctggtgcagtctggggctgaggtgaagaagcctggggcctcagtgaaggtctcctgcaaggcttctggatacaccttcaccggctactatatgcactgggtgcgacaggcccctggacaagggcttgagtggatgggatggatcaaccctaacagtggtgacacaaactatgcacagaagtttcagggctgggtcaccatgaccagggacacgtccctcagcacagcctacatggagctgagcagg

SEQ ID NO: 1628 - DNA, 255 bp, Homo sapiens
  source 1..255: mol_type = other DNA
gaaattgtgttgacgcagtctccaggcaccctgtctttgtctccaggggaaagagccaccctctcctgcagggccagtcagagtattagcagcagctacttagcctggtaccagcagaaacctggccaggctcccaggctcctcatctatggtgcatccagcagggccactggcatcccagacaggttcagtggcagtgggtctgggacagacttcactctcaccatcagcagactggagcctgaagattttgca

SEQ ID NO: 1629 - DNA, 255 bp, Homo sapiens
  source 1..255: mol_type = other DNA
gaggtgcagctggtggagtctgggggaggcttggtacagccagggcggtccctgagactctcctgtacagcttctggattcacctttggtgattatgctatgagctggttccgccaggctccagggaaggggctggagtgggtaggtttcattagaagcaaagcttatggtgggacaacacaacacgccgcctctgtgaaaggcagattcaccatctcaagagatgattccaaaagcatcgcctatctgcaaatg

SEQ ID NO: 1630 - DNA, 255 bp, Homo sapiens
  source 1..255: mol_type = other DNA
gaaatagtgatgacgcagtctccagccaccctgtctgtgtctccaggggaaagagccaccctctcctgcagggccagtcagagtgttagcagcaacttagcctggtaccagcagaaacctggccaggctcccaggctcctcatctatggtgcatccaccagggccactggtatcccagccaggttcagtggcagtgggtctgggacagagttcactctcaccatcagcagcctgcagtctgaagattttgcagtt

SEQ ID NO: 1631 - DNA, 255 bp, Homo sapiens
  source 1..255: mol_type = other DNA
caggtgcagctgcaggagtcgggcccaggactggtgaagccttcggggaccctgtccctcacctgcgctgtctctggtggctccatcagcagtattaactggtggagttgggtccgccagcccccagggaaggggctggagtggatcggggaaatctatcatagtgggaacaccaactataacccgtccctcaagagtcgagtcaccatatcaggagacaagtccaagaaccagttctccctgaagctgagctct

SEQ ID NO: 1632 - DNA, 255 bp, Homo sapiens
  source 1..255: mol_type = other DNA
cagcttgtgctgactcaatcgccctctgcctctgcctccctgggagcctcggtcaagctcacctgcactctgagcagtgggcacagcagctacaccatcgcatggcatcagcagcagccagagaagggccctcggtacttgatgaaagttaacagtgatggcagccacaccaagggggacgggatccctgatcgcttctcaggctccagctctggggctgagcgctacctcaccatctccagcctccagtctgag

SEQ ID NO: 1633 - DNA, 255 bp, Homo sapiens
  source 1..255: mol_type = other DNA
caggtgcagctggtgcagtctggggctgaggtgaagaagcctggggcctcagtgaaggtttcctgcaaggcatctggatacaccttcaccagctactttattcactgggtgcgacaggcccctggacaagggcttgagtggatgggaataatcaaccctagtggtggtagcacaagctacgcacagaagttccagggcagagtcaccatgaccagggacacgtccacgagcacagtctacatggagctgagcagc

SEQ ID NO: 1634 - DNA, 255 bp, Homo sapiens
  source 1..255: mol_type = other DNA
gaaattgtgttgacgcagtctccaggcaccctgtctttgtctccaggggaaagagccaccctctcctgcagggccagtcagagtgttaccagcagctacttagcctggtaccagcagagacgtggccaggctcccaggctcctcatctatggtgcatccagcagggccactggcatcccagacaggttcagtggcagtgggtctgggacagacttcactctcaccatcagcagactggagcctgaagattttgca

SEQ ID NO: 1635 - DNA, 255 bp, Homo sapiens
  source 1..255: mol_type = other DNA
cagctgcagctgcaggagtcgggcccaggactggtgaagccttcggagaccctgtccctcacctgcactgtctctggtggctccatcagcagtagtagttactactggggctggatccgccagcccccagggaaggggctggagtggattgggagtatctattatagtgggagcacctactacaacccgtccctcaagagtcgagtcaccatatccgtagacacgtccaagaaccagttctccctgaagctgagc

SEQ ID NO: 1636 - DNA, 255 bp, Homo sapiens
  source 1..255: mol_type = other DNA
gacatccagatgacccagtctccatcctccctgtctgcatctgtaggagacagagtcaccatcacttgccgggcaagtcagagcattagcagctatttaaattggtatcagcagaaaccagggaaagcccctaagctcctgatctatgctgcatccagtttgcaaagtggggtcccatcaaggttcagtggcagtggatctgggacagatttcactctcaccatcagcagtctgcaacctgaagattttgcaact

SEQ ID NO: 1637 - DNA, 255 bp, Homo sapiens
  source 1..255: mol_type = other DNA
gaggtgcagctggtggagtctgggggaggcttggtaaagccagggcggtccctgagactctcctgtacagcttctggattcacctttggtgattatgctatgagctggttccgccaggctccagggaaggggctggagtgggtaggtttcactagaaggaaagcttatggtgggacaacagagtacgccgcgtctgtgaaaggcagattcaccatctcaagagatgattccaaaagcatcgcctatctgcaaatg

SEQ ID NO: 1638 - DNA, 255 bp, Homo sapiens
  source 1..255: mol_type = other DNA
gatattgtgatgactcagtctccactctccctgcccgtcacccctggagagccggcctccatctcctgcaggtctagtcagagcctcctgcatagtaatggatacaactatttggattggtacctgcagaagccagggcagtctccacagctcctgatctatttgggttctaatcgggcctccggggtccctgacaggttcagtggcagtggatcaggcacagattttacactgaaaatcagcagagtggaggct

SEQ ID NO: 1639 - DNA, 255 bp, Homo sapiens
  source 1..255: mol_type = other DNA
gaggtgcagctggtggagtctgggggaggcttggtccagcctggggggtccctgagactctcctgtgcagcctctggattcaccttaagtagctattggatgagctgggtccgccaggctccagggaaggggctggagtgggtggccaacataaagcaagatggaagtgagaaatactatgtggactctgtgaagggccgattcaccatctccagagacaacgccaagaactcactgtatctgcaaatgaacagc

SEQ ID NO: 1640 - DNA, 255 bp, Homo sapiens
  source 1..255: mol_type = other DNA
cagactgtggtgacccaggagccatcgttctcagtgtcccctggagggacagtcacactcacttgtggcttgagctctggctcagtctctactagttactaccccagctggtaccagcagaccccaggccaggctccacgcacgctcatctacagcacaaacaaacgctcttctggggtccctgatcgcttctctggctccatccttgggaacaaagctgccctcaccatcacgggggcccaggcagatgatgaa

SEQ ID NO: 1641 - DNA, 255 bp, Homo sapiens
  source 1..255: mol_type = other DNA
caggtccagcttgtgcagtctggggctgaggtgaagaagcctggggcctcagtgaaggtttcctgcaaggcttctggatacaccttcactagctatgctttgcattgggtgcgccaggcccccggacaaaggcttgagtggatgggatggatcaacgctggcaatggtaacacaaaatattcacagaggttccagggcagagtcaccattattagggacacatccgcgagcacaacctacatggagctgagcagc

SEQ ID NO: 1642 - DNA, 255 bp, Homo sapiens
  source 1..255: mol_type = other DNA
gacatcgtgatgacccagtctccagactccctggctgtgtctctgggcgagagggccaccatcaactgcaagtccagccagagtgttttatacagctccaacaataagaactacttagcctggtaccagcagaaaccaggacagcctcctaagctgctcatttactgggcatctacccgggaatccggggtccctgaccgattcagtggcagcgggtctgggacagatttcactctcaccatcagcagcctgcag

SEQ ID NO: 1643 - DNA, 255 bp, Homo sapiens
  source 1..255: mol_type = other DNA
caggtgcagctgcaggagtcgggcccaggactggtgaagccttcggagaccctgtccctcacctgcactgtctctggtggctccatcagtagttcctactggagctggatccggcagcccccagggaagggactggagtggattgggtatatctattacagtgggaacaccaactacaacccctccctcaagagtcgagtcaccctatcaatagacacgtccaagaaccagttctccctgaagctgagctctgtg

SEQ ID NO: 1644 - DNA, 255 bp, Homo sapiens
  source 1..255: mol_type = other DNA
gagattgtgttgacgcactctccaggcaccctgtctttgtctccaggggaaagagccaccctctcctgcagggccagtcagagtgtccgcagctacttagcctggtaccagcagaaacctggccaggctcccaggctcctcatctatggtgcatccagcagggccactggcatcccagacaggttcagtggcagtgggtctgggacagacttcactctcaccatcagcagactggagcctgacgattttgcagtg

SEQ ID NO: 1645 - DNA, 255 bp, Homo sapiens
  source 1..255: mol_type = other DNA
caggtccagctggtgcagtctggggctgaggtgaagaagcctgggtcctcggtgaaggtctcctgcaaggcttctggaggcaccttcagcagctatgctatcagctgggtgcgacaggcccctggacaagggcttgagtggatgggaaggatcatccctatccttggtatagcaaactacgcacagaagttccagggcagagtcacgattaccgcggacaaatccacgagcacagcctacatggagctgagcagc

SEQ ID NO: 1646 - DNA, 255 bp, Homo sapiens
  source 1..255: mol_type = other DNA
caggctgtggtgactcaggagccctcactgactgtgtccccaggagggacagtcactctcacctgtggctccagcactggagctgtcaccagtggtcattatccctactggttccagcagaagcctggccaagcccccaggacactgatttatgatacaagcaacaaacactcctggacacctgcccggttctcaggctccctccttgggggcaaagctgccctgaccctttcgggtgcgcagcctgaggatgag

SEQ ID NO: 1647 - DNA, 255 bp, Homo sapiens
  source 1..255: mol_type = other DNA
caggtgcagctgcaggagtcgggcccaggactggtgaagccttcggagaccctgtccctcacctgcactgtctctggtggctccatcaatagtttctactggaactggatccggcagccccccgggaagggactggagtggattgggtatatctattacagtgggaacaccaagtacaacccctccctcaagagtcgagtcaccatatcagtagacacgtccaacagccagttctccctgaagctgagctctgtg

SEQ ID NO: 1648 - DNA, 255 bp, Homo sapiens
  source 1..255: mol_type = other DNA
gacatccagatgacccagtctccatcctccctgtctgcatctctgggagacggggtcaccatcacttgccgggcaagtcagagcattagcagctatttaagttggtatcagcagaaacccgggaaagcccctaagctcctgatctatgctgcatccagtttgcaaagtggggtcccatcaaggttcagtggcagtggatctgggacagatttcactctcaccatcagcagtctgcaacctgaagattttgcaact

SEQ ID NO: 1649 - DNA, 255 bp, Homo sapiens
  source 1..255: mol_type = other DNA
caggtgcagctgcaggagtcgggcccaggactggtgaagccttcggagaccctgtccctcacctgcactgtctctggtggctccatcagtagttactactggagctggatccggcagcccccagggaagggactggagtggattggatatatctattacagtgggagcaccaagtacaacccctccctcaagagtcgagtcaccatatcagtagacacgtccaagaaccagttctccctgaagctgacctctgtg

SEQ ID NO: 1650 - DNA, 255 bp, Homo sapiens
  source 1..255: mol_type = other DNA
gaaattgtgttgacgcagtctccaggcaccctgtctttgtctccaggggaaagagccaccctctcctgcagggccagtcagagtgttagcagcagctacttagcctggtaccagcagaaacctggccaggctcccaggctcctcatctatggtgcatccagcagggccactgacatcccagacaggttcagtggcagtgggtctgggacagacttcactctcaccatcagcagactggagcctgaagattttgca

SEQ ID NO: 1651 - DNA, 255 bp, Homo sapiens
  source 1..255: mol_type = other DNA
caggtgcagctggtgcagtctggggctgaggtgaagaagcctggggcctcagtgagggtttcctgcaaggcatctggatacaccttcaccagctactatatctactgggtgcgacaggcccctggacaagggcttgagtggatgggagtaatcaaccctagtggtggtagcacaagctacgcacagaagttccagggcagagtcaccttgaccagggacacgtccacgagcacagtctacatggacctgagcagt

SEQ ID NO: 1652 - DNA, 255 bp, Homo sapiens
  source 1..255: mol_type = other DNA
cagtctgtgctgacgcagccgccctcagtgtctggggccccagggcagagggtcaccatcccctgcactgggagcagcttcaacatcggggcaggttatgatgtacactggtaccagcagcttccaggaacagcccccaaactcctcatctttggtaacagcaatcggccctcaggggtccctgaccgattctctggctccaggtctggcacctcagcctccctggccatcactgggctccaggctgaggatgag

SEQ ID NO: 1653 - DNA, 255 bp, Homo sapiens
  source 1..255: mol_type = other DNA
gaggtgcagctggtggagtctgggggaggcttggtccagcctggggggtccctgagactctcctgtgcagcctctggattcaccgtcagtagcaactacatgagctgggtccgccaggctccagggaaggggctggagtgggtctcagttatttatagcgatggtaacacatactatgcagactccgtgaagggcagattcaccatctccagagacaattccaagaacatgttatatcttcaaatgaacagcctg

SEQ ID NO: 1654 - DNA, 255 bp, Homo sapiens
  source 1..255: mol_type = other DNA
tcctatgagctgactcagccaccctcagtgtccgtgtccccaggacagacagccagcatcacctgctctggggataaattgggggatagatatgtttgttggtatcagcagaagccaggtcagtcccctgtgctggtcatctatcaagataccaagcggccctcagggatccctgagcgattctctggctccaactctgggaacacagccactctgaccatcagcgggacccaggctatggatgaggctgactat

SEQ ID NO: 1655 - DNA, 255 bp, Homo sapiens
  source 1..255: mol_type = other DNA
gaggtgcagctggtggagtctggaggaggcttggtccagcctggggggtccctgagactctcctgtgcagcctctgggttcaccgtcagtagcaactacatgagctgggtccgccaggctccagggaaggggctggagtgggtctcagatatttatagcggtggtagcacatactacgcagactccgtgaagggccgattcaccatctccagacacaattccaagaacacgctgtatcttcaaatgaacagcctg

SEQ ID NO: 1656 - DNA, 255 bp, Homo sapiens
  source 1..255: mol_type = other DNA
gaaattgtgttgacgcagtctccaggcaccctgtctttgtctccaggggaaagagccaccctctcctgcagggccagtcagagtgttagcagcagctacttagcctggtaccagcagaaacctgaccaggctcccaggctcctcatctatggtgcatccagcagggccactggcatcccagacaggttcagtggcagtgggtctgggacagacttcactctcaccatcagcagactggagcctgaagattttgca

SEQ ID NO: 1657 - DNA, 255 bp, Homo sapiens; identical to SEQ ID NO: 1635
  source 1..255: mol_type = other DNA

SEQ ID NO: 1658 - DNA, 255 bp, Homo sapiens
  source 1..255: mol_type = other DNA
gccatccagttgacccagtctccatcctccctgtctgcatctgtaggagacagagtcaccatcacttgccgggcaagtcagggcattagcagtgctttagcctggtatcagcagaaaccagggaaagctcctaagctcctgatctatgatgcctccagtttggaaagtggggtcccatcaaggttcagcggcagtggatctgggacagatttcactctcaccatcagcagcctgcagcctgaagattttgcaact

SEQ ID NO: 1659 - DNA, 255 bp, Homo sapiens
  source 1..255: mol_type = other DNA
gaggtgcagctggtggagtctggaggaggcttggtccagcctggggggtccctgagactctcctgtgcagcctctgggttcaccgtcagtagcaactacatgagctgggtccgccaggctccagggaaggggctggagtgggtctcagttatttatagcggtggtagcacatactacgcagactccgtgaagggccgattcaccatctccagacacaattccaagaacacgctgtatcttcaaatgaacagcctg

SEQ ID NO: 1660 - DNA, 255 bp, Homo sapiens
  source 1..255: mol_type = other DNA
cagactgtggtgacccaggagccatcgttctcagtgtcccctggagggacagtcacactcacttgtggcttgagctctggctcagtctctactagttactaccccagctggtaccagcagaccccaggccaggctccacgcacgctcatctacagcacaaacactcgctcttctggggtccctgatcgcttctctggctccatccttgggaacaaagctgccctcaccatcacgggggcccaggcagatgatgaa

SEQ ID NO: 1661 - DNA, 255 bp, Homo sapiens
  source 1..255: mol_type = other DNA
caggtgcagctgcaggagtcgggcccaggactggtgaagccttcggagaccctgtccctcacctgcactgtctctggtggctccatcagtagttactactggagctggatccggcagcccccagggaagggactggagtggattgggtatatctattacagtgggagcaccaactacaacccctccctcaagagtcgagtcaccatatcagtagacacgtccaagaaccagttctccctgaagctgagctctgtg

SEQ ID NO: 1662 - DNA, 255 bp, Homo sapiens
  source 1..255: mol_type = other DNA
cagtctgtgctgactcagccaccctcagcgtctgggacccccgggcagagggtcaccatctcttgttctggaagcagctccaacatcggaagtaattatgtatactggtaccagcagctcccaggaacggcccccaaactcctcatctataggaataatcagcggccctcaggggtccctgaccgattctctggctccaagtctggcacctcagcctccctggccatcagtgggctccggtccgaggatgaggct

SEQ ID NO: 1663 - DNA, 255 bp, Homo sapiens
  source 1..255: mol_type = other DNA
gaggtgcagctggtggagtctgggggaggcttggtacagcctggggggtccctgagactctcctgtgcagtctctggattcaccttcagtagctatagcatgaactgggtccgccaggctccagggaaggggctggagtgggtttcatacattagtagtagtagtagtatcatatactacgcagactctgtgaagggccgattcaccatctccagagacaacgccaagaactcactgtatctgcaaatgaacagc

SEQ ID NO: 1664 - DNA, 255 bp, Homo sapiens
  source 1..255: mol_type = other DNA
tcctatgtgctgactcagccaccctcggtgtcagtggccccaggacagacggccaggattacctgtgggggagacaacattggaagtaaaaatgtgcactggtaccagcagaagcccggccaggcccctgtgctggtcgtctttgatgatagcgaccggccctcagggatccctgagcgattctctggctccaactctgggaacacggccaccctgaccatcagcagggtcgaagccggggatgaggccgactat

SEQ ID NO: 1665 - DNA, 255 bp, Homo sapiens
  source 1..255: mol_type = other DNA
gaggtgcagctggtggagtctgggggaggcttggtacagccagggcggtccctgagactctcctgtacagcttctggattcacctttggtgattatgctatgagctggttccgccaggctccagggaaggggctggagtgggtaggtttcattagaagcaaagcttatggtgggacaacacaatacgccgcctctgtgaaaggcagattcaccatctcaagagatgattccaaaagcatcgcctatctgcaaatg

SEQ ID NO: 1666 - DNA, 255 bp, Homo sapiens; identical to SEQ ID NO: 1630
  source 1..255: mol_type = other DNA

SEQ ID NO: 1667 - DNA, 255 bp, Homo sapiens
  source 1..255: mol_type = other DNA
caggtgcagctgcaggagtcgggcccaggactggtgaagccttcggagaccctgtccctcacctgcactgtctctggtggctccatcagtagttactactggagctggatccgtcagcccccagggaaggggctggagtggattggctatgtctattacagtgggaacaccaaatacaacccctccctcaagagtcgagtcaccatatcagtagacacgtccaagaaccagttctccctgaagctgggctctgtg

SEQ ID NO: 1668 - DNA, 255 bp, Homo sapiens
  source 1..255: mol_type = other DNA
gacatccagatgacccagtctccatcctccctgtctgcatctgtaggagaccgggtcaccatcacttgccgggcaagtcagagcattagaagctatttaaattggtatcagcagaaacgagggaaagcccctaagctcctgatctatgctgcatccagtttgcaaagtggggtcccatcaaggttcagtggcagtggatctgggacagatttcactctcaccatcagcagtctgcaacctgaagattttgcaact

SEQ ID NO: 1669 - DNA, 255 bp, Homo sapiens
  source 1..255: mol_type = other DNA
caggtgcagctggtggagtctgggggaggcgtggtccagcctgggaggtccctgagactctcctgtgcagcctctggattcaccttcagtaactatggcatgcactgggtccgccaggctccaggcaaggggctggagtgggtggccgttatatggtatgatggaagtaataaatactatgcagactccgtgaagggccgattcaccatctccagagacaattccaagaacacgctgtatctgcaaatgaacagc

SEQ ID NO: 1670 - DNA, 255 bp, Homo sapiens
  source 1..255: mol_type = other DNA
gaaattgtgttgacacagtctccagccaccctgtctttgtctccaggggaaagagccaccctctcctgcagggccagtcagagtgttagcagctacttagcctggtaccaacagaaacctggccaggctcccaggctcctcatctatgatgcatccaacagggccactggcatcccagccaggttcagtggcagtgggtctgggacagacttcactctcaccatcagcagcctagagcctgaagattttgcagtt

SEQ ID NO: 1671 - DNA, 255 bp, Homo sapiens
  source 1..255: mol_type = other DNA
caggtgcagctggtggagtctgggggaggcgtggtccagcctgggaggtccctgagactctcctgtgcagcctctggattcaccttcactagctatgctatgcactgggtccgccaggctccaggcaaggggctggagtgggtggcagttatatcatatgatggaggcagtaaatactacgcagactccgtgaagggccgattcaccatctccagagacaattccaagaacacgctgtatctgcaaatgaacagc

SEQ ID NO: 1672 - DNA, 255 bp, Homo sapiens
  source 1..255: mol_type = other DNA
gccatccagttgacccagtctccatcctccctgtctgcatctgtaggagacagagtcaccatcacttgccgggcaagtcagggcattagcagtgctttagcctggtatcagcagacaccagggaaagctcctaagctcctgatctatgatgcctccagtttggaaagtggggtcccgtcaaggttcagcggcagtggatctgggacagatttctctctcaccatcggcagcctgcagcctgaagattttgcaagt

SEQ ID NO: 1673 - DNA, 255 bp, Homo sapiens
  source 1..255: mol_type = other DNA
caggtccaactggtacagtctggggctgaggtgaagaagcctggggcctcagtgaaggtctcctgcaaggtttccggatacaccctcattgaattatccatgcactgggtgcgacaggctcctggaaaagggcttgagtggatgggaggttttgatcctgaagatggtgaaacaatctacgcacagaagttccagggcagagtcaccatgaccgaggacacatctacagacacagcctacatggcgctgagcagc

SEQ ID NO: 1674 - DNA, 255 bp, Homo sapiens
  source 1..255: mol_type = other DNA
caggcagggctgactcagccaccctcggtgtccaagggcttgagacagaccgccacactcacctgcactgggagcagcaacaatgttggcaaccaaggagcagcttggttgcagcagcaccagggccaccctcccaaactcctatcctacaggaataacaaccggccctcagggatctcagagagattctctgcatccaggtcaggaaacacagcctccctgaccattactggactccagcctgaggacgaggca

SEQ ID NO: 1675 - DNA, 255 bp, Homo sapiens
  source 1..255: mol_type = other DNA
cagatcaccttgaaggagtctggtcctacgctggtgaaacccacacagaccctcacgctgacctgcaccttctctgggttctcactcaacactagtggagtgggtgtgggctggatccgtcagcccccaggaaaggccctggagtggcttgcactcatttattgggatgatgataagcgctacagcccatctctgaagagcaggctcaccatcaccaaggacacctccaaaaaccaggtggtccttacaatgacc

SEQ ID NO: 1676 - DNA, 255 bp, Homo sapiens; identical to SEQ ID NO: 1616
  source 1..255: mol_type = other DNA

SEQ ID NO: 1677 - DNA, 255 bp, Homo sapiens
  source 1..255: mol_type = other DNA
caggtgcagctgcaggagtcgggcccaggactggtgaagccttcggagaccctgtccctcacgtgcactgtctctggtggctccatcagtagttactactggagctggatccggcagccccccgggaagggactggagtggattgggaatatctataacagtgggagcaccaactacaacccctccctcaagagtcgactcaccatatcagttgacacgtccaagaaccacttctccctgaagctgagctctgtg

SEQ ID NO: 1678 - DNA, 255 bp, Homo sapiens
  source 1..255: mol_type = other DNA
tcctatgagctgacacagccaccctcggtgtcagtgtccctaggacagatggccaggatcacctgctctggagaagcattgccaaaaaaatatgcttattggtaccagcagaagccaggccagttccctatactggtgatatataaagacagcgagaggccctcagggatccctgagcgattctctggctccagctcagggacaatagtcacattgaccatcagtggagtccaggcagaagacgaggctgactat

SEQ ID NO: 1679 - DNA, 255 bp, Homo sapiens
  source 1..255: mol_type = other DNA
caggtgcagctggtggagtctgggggaggcgtggtccagcctgggaggtccctgagactctcctgtgcagcctctggattcaccttcagtagctatggcatgcactgggtccgccaggctccaggcaaggggctggagtgggtggcagttatatcatatgatggaagtaataaatactatgcagactccgtgaagggccgattcaccatctccagagacaattccaagaacacgctgtatctgcaaatgaacagc

SEQ ID NO: 1680 - DNA, 255 bp, Homo sapiens
  source 1..255: mol_type = other DNA
tcctatgagctgactcagccaccctcagtgtccgtgtccccaggacagacagccagcatcacctgctctggagataaattgggggataaatatgcttgctggtatcagcagaagccaggccagtcccctgtgctggtcatctatcaagatagcaagcggccctcagggatccctgagcgattctctggctccaactctgggaacacagccactctgaccatcagcgggacccaggctatggatgaggctgactat

SEQ ID NO: 1681 - DNA, 255 bp, Homo sapiens
  source 1..255: mol_type = other DNA
caggtgcagctggtggagtctgggggaggcgtggtccagcctgggaggtccctgagactctcctgtgcagcgtctggattcaccttcagtagctatggcatgcactgggtccgccaggctccaggcaaggggctggagtgggtggcagttatatggtatgatggaagtaataaatactatgcagactccgtgaagggccgattcaccatctccagagacaattccaagaacacgctgtatctgcaaatgaacagc

SEQ ID NO: 1682 - DNA, 255 bp, Homo sapiens; identical to SEQ ID NO: 1680
  source 1..255: mol_type = other DNA

SEQ ID NO: 1683 - DNA, 255 bp, Homo sapiens
  source 1..255: mol_type = other DNA
caggtcaccttgagggagtctggtcctgcgctggtgaaacccacacagaccctcacactgacctgcaccttctctgggctctcactcagcagtagtggaatgtgtgtgagctggatccgtcagcccccagggaaggccctggagtggcttgcacgcattgattgggatgatgataaatactacagcacatctctgaagaccaggctcaccatctccaaggacacctccaaaaatcaggtggtccttacaatgacc

SEQ ID NO: 1684 - DNA, 255 bp, Homo sapiens
  source 1..255: mol_type = other DNA
gacatccagatgacccagtctccttccaccctgtctgcatctgtaggagacagagtcaccatcacttgccgggccagtcagagtattagtagctggttggcctggtatcagcagaaaccagggaaagcccctaagctcctgatctataaggcgtctagtttagaaagtggggtcccatcaaggttcagcggcagtggatctgggacagaattcactctcaccatcagcagcctgcagcctgatgattttgcaact

SEQ ID NO: 1685 - DNA, 255 bp, Homo sapiens
  source 1..255: mol_type = other DNA
gaggtgcagctggtgcagtctggagcagaggtgaaaaagcccggggagtctctgaagatctcctgtaagggttctggatacagctttaccacctactggatcgcctgggtgcgccagatgcccgggaaaggcctggagtgggtggggatcatctatcctgatgactctgataccagatacagcccgtccttccaaggccaggtcaccatctcagccgacaagtccatcggtaccgcctacctgcagtggagtagc

SEQ ID NO: 1686 - DNA, 255 bp, Homo sapiens
  source 1..255: mol_type = other DNA
cagtctgtgctgacgcagccgccctcagtgtctggggccccagggcagagggtcaccatctcttgcactgggagcaggtccaacatcggggcaggttatgatgtacagtggtaccagcaggttccaggaacagcccccaaactcctcatctctggtaacagcaatcggccctcaggggtccctgaccgattctctggctccaagtctggcacctcagcctccctggccatcactgggctccaggctgaggatgag

SEQ ID NO: 1687 - DNA, 255 bp, Homo sapiens
  source 1..255: mol_type = other DNA
gaggtgcagctggtgcagtctggagcagaggtgaaaaagcccggggagtctctgaagatctcctgtaagggttctggatacagctttaccagctactggatcggctgggtgcgccagatgcccgggaaaggcctggagtggatggggatcatctatcctggtgactctgataccagatacagcccgtccttccaaggccaggtcaccatctcagccgacaagtccatcactaccgcctacctgcagtggagcagc

SEQ ID NO: 1688 - DNA, 255 bp, Homo sapiens
  source 1..255: mol_type = other DNA
gacatccagatgacccagtctccttccaccctgtctgtatctgtaggagacagagtcaccatcacttgccgggccagtcagagtgttagtagctggttggcctggtatcagcagaaaccagggaaagcccctaagctcctgatctatgatgcctccagtttggaaagtggggtcccatcaaggttcagcggcagtggatctgggacagaattcactctcaccattagcagcctgcagcctgatgattttgcaact

SEQ ID NO: 1689 - DNA, 255 bp, Homo sapiens
  source 1..255: mol_type = other DNA
caggtgcagctggtggagtctgggggaggcgtggtccagcctggggggtccctgagactctcctgtgcagcgtctggattcaccttcagtagctatggcatgcactgggtccgccaggctccaggcaaggggctggagtgggtgacatttacacggtatgatggaagtaataagttctatgcagactccgtgaagggccgattctccatctccagagacaattccaagaacacgttgtatctgcaaatgaatagt

SEQ ID NO: 1690 - DNA, 255 bp, Homo sapiens; identical to SEQ ID NO: 1638
  source 1..255: mol_type = other DNA

SEQ ID NO: 1691 - DNA, 255 bp, Homo sapiens
  source 1..255: mol_type = other DNA
gaggtgcagttattggagtctgggggaggcttggtacagcctggggggtccctgagactctcctgtgcagcctctggattcacctttagcaactatgccatgagctgggtccgccaggctccagggaaggggctggagtgggtctcagctattcgtaatagtggtagtagcacatactatgctgactccgtgaagggccggttcaccatctccagagacaattccaagaacacgctgtatctgcaaatgaacagc

SEQ ID NO: 1692 - DNA, 255 bp, Homo sapiens
  source 1..255: mol_type = other DNA
gacatccagatgacccagtctccatcctccctgtctgcatctgtaggagacagagtcaccatcacttgccgggcaagtcagagcattagcaactatttaaattggtatcagcagaaaccagggaaagcccctgacctcctgatctatgctgcatccagtttgcaaagtggggtcccattaaggttcagtggcagtggatctgggacagatttcactctcaccatcagcagtctgcaacctgaagattttgcaact

SEQ ID NO: 1693 - DNA, 255 bp, Homo sapiens
  source 1..255: mol_type = other DNA
caggtgcagctggtgcagtctggggctgaggtgaagaagcctggggcctcagtgaaggtctcctgcaaggcttctggatacaccttcaccggctactatatgcactgggtgcgacaggcccctggacaaggtcttgagtggatgggacggatcaaccctaacagtggtggcacaaactttgcacagaggtttcagggcagggtctccatgaccagggacacctccatcagcacagcctacatggaactgagcagc

SEQ ID NO: 1694 - DNA, 255 bp, Homo sapiens
  source 1..255: mol_type = other DNA
cagtctatgctgactcagccaccctcagcgtctgggacccccgggcagagggtcaccatctcttgttctggaagcagctccaacatcggaagtaattatgtatactggtaccagcagctcccaggaacggcccccaaactcctcatctataggaataatcagcggccctcaggggtccctgaccgattctctggctccaagtctggcacctcagcctccctggccatcagtgggctccggtccgaggatgaggct

SEQ ID NO: 1695 - DNA, 255 bp, Homo sapiens
  source 1..255: mol_type = other DNA
caggtgcaactggtgcagtctggggctgaggtgaagaagcctggggcctcagtgaaggtctcctgcaagtcttctggatacaccttcaccggctactatatgcactgggtgcgacaggcccctggacaagggcttgagtggatgggacggatcaaccctaatagtggtggcacaaactatgcacagaagtttcagggcagggtcaccatgaccagggacacgtccatcagcacagcctacatggaactgagcagg

SEQ ID NO: 1696 - DNA, 255 bp, Homo sapiens
  source 1..255: mol_type = other DNA
cagtctgccctgactcagcctcgctcagtgtccgggtctcctggacagtcagtcactatctcctgcactggaaccagcagtgatgttggtggttataagtatgtctcctggtaccaacagcacccaggcaaagcccccaaactcatgatttatgacgtcagtaagcggccctcaggggtccctgatcgcttctctggctccaagtctggcaacacggcctccctgaccatctctgggctccaggctgaggatgag

SEQ ID NO: 1697 - DNA, 255 bp, Homo sapiens
  source 1..255: mol_type = other DNA
gaggtgcagctggtggagtctgggggaggcctggtcaagccgggggggtccctgagactctcctgtgcagcctctggattcaccttcagtgactataccatgaactgggtccgacaggctccagggaagggactggagtgggtctcatccattactagaagtagtacttacatctactacgcagactcagtgaagggccgattcaccatctccagagacaacgccaagaactcactgtatctgcaaatgaacagc

SEQ ID NO: 1698 - DNA, 255 bp, Homo sapiens
  source 1..255: mol_type = other DNA
gaaattgtgttgacgcagtctccaggcaccctgtctttgtctccaggggaaagagccaccctctcctgcagggccagtcagagtcttagcagcagctacttagcctggtaccagcagaaacctggccagtctcccaggctcctcatttatggtgcatccagcagggccactggcatcccagacaggttcagtggcagtgggtctgggacagacttcactctcaccatcaacagactggagcctgaagattttgca

SEQ ID NO: 1699 - DNA, 255 bp, Homo sapiens
  source 1..255: mol_type = other DNA
gaggtgcagctggtggagtctgggggaggcttggtacagcctggggggtccctgagactctcctgtgcagcctctggattcacctttagcagctatgccatgagctgggtccgccaggctccagggaaggggctggagtgggtctcatctattagaggtagtggtggtagcacatactacgcagactccgtgaagggccggttcaccatctccagagacaactccaagtacacgttgtatctgcaaatgaacagc

SEQ ID NO: 1700 - DNA, 255 bp, Homo sapiens
  source 1..255: mol_type = other DNA
gacatccagatgacccagtctccatcctccctgtctgcatctgtaggagacagagtcaccatcacttgccgggcaagtcagagcattagcagctatttaaattggtatcagcagaaaccagggaaagcccctaagctcctgatctatgctgcatccagtttgcaaagtggggtcccatcaaggttcagtggcagtggatctgggacagatttcactctcaccatcagcagtctgcaacctgaagattttgcaatt

SEQ ID NO: 1701 - DNA, 255 bp, Homo sapiens
  source 1..255: mol_type = other DNA
gaggtgcgcctggtgcagtctgggggaggcttggtaaagcccggggggtccctgagactctcctgtgcagcctctggattcaccttcagcaccgcctgggtgaggtgggtccgccaggctccagggaaggggctggagtgcgttggccgaatcaaaagtaaaaatgacggtgacagagcagagtacgctgcacccgcgagaggcagattcatcatctcaagagatgatgcagaaaacattctgtatttacaaatg

SEQ ID NO: 1702 - DNA, 255 bp, Homo sapiens
  source 1..255: mol_type = other DNA
gacatccagatgacccagtctccatctgccatgtctgcatctgtaggagacagagtcaccatcacttgtcgggcgagtcaggacattaacacctttttaacgtggtttcagcagaaaccaggaaaagtccctcagcgcctgatctttgctgcatatcgtttgcaaagtggggtcccttcaaggttcagtggcagtggatctgggacagaattcactctcacaatcaacagcctgcagcctgaagatgttgcgact

SEQ ID NO: 1703 - DNA, 255 bp, Homo sapiens
  source 1..255: mol_type = other DNA
gaggtgcagctggtgcagtctggagcagaggtgaaaaagcccggggagtctctgaagatctcctgtaagggttctggatacaggtttaccagatactggatcggctgggtgcgccagatgcccgggaaaggcctggagtggatggggatcatctatcttggtgactctgaaaccagatacagtccgtccttccaaggccaggtcaccatctcagccgacaactccatcagcaccgcctacctgcagtggagcagc

SEQ ID NO: 1704 - DNA, 255 bp, Homo sapiens
  source 1..255: mol_type = other DNA
gacatccagatgacccagtctccttccaccctgtctgcatctgtgggagacagagtcaccatcacttgccgggccagtcagagtattactagttggttggcctggtatcagcagaaatcagggaaagcccctaaactcctgatctatgatgcctccagtttggaaagtggggtcccatcaaggttcagcggcagtggatctgggacagaattcactctcaccatcagcagcctgcagcctgatgattttgcaact

SEQ ID NO: 1705 - DNA, 255 bp, Homo sapiens
  source 1..255: mol_type = other DNA
caggtgcagctgcaggagtcgggcccaggactggtgaagccttcggagaccctgtccctcacctgcactgtctctggtggctccatcagtagtgactactggagctggatccggcagcccccagggaagggactggagtggattggatatatgtattacagtgggagcaccaactacaacccctccctcaagagtcgagtcaccatatcagtagacacgtccaagaaccagttctccctgaagctgagctctgtg

SEQ ID NO: 1706 - DNA, 255 bp, Homo sapiens
  source 1..255: mol_type = other DNA
gatattgtgatgactcagtctccactctccctgcccgtcacccctggagagccggcctccatctcctgcaggtctagtcagagcctcctgcatagtaatggatacaactatttggattggtacctgcagaagccagggcagtctccacagctcctgatctatttgggttctaatcgggcctccggggtccctgacaggttcagtggcagtgcatcaggcacagattttacactgaaaatcagcagagtggaggct

SEQ ID NO: 1707 - DNA, 255 bp, Homo sapiens
  source 1..255: mol_type = other DNA
gaggtgcagctggtgcagtctggagcagaggtgaaaaagcccggggagtctctgaagatctcctgtaagggttctgcatacacctttaccacctactggatcggctgggtgcgccagatgcccgggaaaggcctggagtggatggggatcatctatcctggtgactctgataccagatacagcccgtccttccaaggccaggtcaccatctcagccgacaagtccatcagcaccgcctacctgcagtggagcagc

SEQ ID NO: 1708 - DNA, 255 bp, Homo sapiens
  source 1..255: mol_type = other DNA
gacatccagatgacccagtctccttccaccctgtctgcatctgtaggagacagagtcaccatcacttgccgggccagtcagagtattagtagctggttggcctggtatcagcagaaaccagggaaagcccctaacctcctgatctatgatgcctccagtttggaaagtggggtcccatcaaggttcagcggcagtggatctgggacagaattcactctcaccatcagcagcctgcagcctgatgattttgcaact

SEQ ID NO: 1709 - DNA, 255 bp, Homo sapiens
  source 1..255: mol_type = other DNA
caggtgcagctgctgcagtctggggctgaagtgaagaagcctggggcctcagtgaaggtctcctgcaaggcttctggatacaccttcaccggctactatatgcactgggtgcgacaggcccctggacaagggcttgagtggatgggacggatcaaccctaacagtggtggcacaaattatgcacagaagtttcagggcagggtcaccatgaccagggacacgtccatcagcacagcctacatggagctgagcagg

SEQ ID NO: 1710 - DNA, 255 bp, Homo sapiens
  source 1..255: mol_type = other DNA
cagtctgtgctgacgcagccgccctcagtgtctgaggccccagggcagagggtcaccatctcctgcactgggagcagctccaacatcggggcaggttatgatgtacactggtaccagcagcttccaggaacagcccccaaactgctcatctatggtaacattaatcggccctcaggggtccctgaccgattctctggctccaagtctggcacctcagcctccctggccatcactgggctccaggctgaggatgag

SEQ ID NO: 1711 - DNA, 255 bp, Homo sapiens
  source 1..255: mol_type = other DNA
caggtgcagctgcaggagtcgggcccaggactggtgaagccttcggagaccctgtccctcacctgcagtgtctctggtggctccatcagtgattactactggagctggatccggcagccccctgggaagggactggagtggattggatatatctataacagtgggagtaccaactacaacccctccctcaagagtcgagtcaccatatcagcagacccgtccaagaaccagttctccctgaagttgagctctgtg

SEQ ID NO: 1712 - DNA, 255 bp, Homo sapiens
  source 1..255: mol_type = other DNA
gaaattgtgttgacgcagtctccaggcaccctgtctttgtctccaggggaaagagccaccctctcatgtagggccagtcagagtgttagcagcaacttcctagcctggtaccagcagaaacctggccagcctcccaggctcctcatctatggtgcatccgtcagggccactggcatcccagacaggttcagtggcagtgggtctgggacagacttcactctcaccatcaccagactggagcctgaagattttgca

SEQ ID NO: 1713 - DNA, 255 bp, Homo sapiens
  source 1..255: mol_type = other DNA
caggtccagctggtgcaatctggggctgaggtgatgaagcctgggtcctcggtgaaggtctcctgcaaggcttctggaggcaccttcagcagctatagtatcacctgggtgcgacaggcccctggacaagggcttgagtggatgggaaggatcatccctatccttggtatagcaaactacgcacagaagttccagggcagagtcacgattaccgcggacaaatccacgagcacagcctacatggagctgagcagc

SEQ ID NO: 1714 - DNA, 255 bp, Homo sapiens
  source 1..255: mol_type = other DNA
catccagatgacccagtctccttccaccctgtctgcatctgtaggagacagagtcaccatcacttgccgggccagtcagagtattagtagctggttggcctggtatcagcagaaaccagggaaagcccctaagctcctgatctatgatgcctccagtttgcaaagtggggtcccatcaaggttcagcggcagtggatctgggacagaattcactctcaccatcagcagcctgcagcctgatgattttgcaactta

SEQ ID NO: 1715 - DNA, 255 bp, Homo sapiens
  source 1..255: mol_type = other DNA
cagctgcagctgcaggagtcgggcccaggactggtgaagccttcggagaccctgtccctcacctgcactgtctctggtggctccatcagcagtagtagttactactggggctggatccgccagcccccagggaaggggctggagtggattgggagtatctattatagtgggagcacctactacaacccgtccctcaagagtcgattcaccatatccgtagacacgtccaagaaccagttctccctgaagctgagc

SEQ ID NO: 1716 - DNA, 255 bp, Homo sapiens
  source 1..255: mol_type = other DNA
tcctatgagctgactcagccaccctcagtgtccgtgtccccaggacagacagccagcatcacctgctctggagataaattgggggataaatatgcttgctggtatcagcaaaagccaggccagtcccctgtgctggtcatctatcaagataccaagcggccctcagggatccctgagcgattctctggctccaactctgggaacacagccactctgaccatcagcgggacccaggctatggatgaggctgactat

SEQ ID NO: 1717 - DNA, 255 bp, Homo sapiens
  source 1..255: mol_type = other DNA
gaggtgcacctggtgcagtctggagcagaggtgaaacagcccggggagtctctgaagatctcctgtaagggttctggatacaactttgccacctactggatcgcctgggtgcgccagatgcccgggaaaggcctggagtggatggggatcatctatcctggtgactctgataccagatacagcccgtccttccaaggccaggtcatcatctcagccgacaagtccatcggcaccgccttcctgcagtggagcagc

SEQ ID NO: 1718 - DNA, 255 bp, Homo sapiens
  source 1..255: mol_type = other DNA
cagtctgtgctgacgcagccgccctcaatgtctggggccccagggcagagggtcaccatctcctgcactgggagcagctccaacatcggggcaggttatgatgtacactggtaccagcagcttccaggagcagcccccaaactcctcatctatggtgacaccagtcggccctcaggggtccctgaccgattctctggctccaagtctgacacctcagcctccctggccatcactgggctccaggctgaggatgag

SEQ ID NO: 1719 - DNA, 255 bp, Homo sapiens
  source 1..255: mol_type = other DNA
caggtgcagctggtgcagtctggggctgaggtgaagaagcctggggcctcagtgaaggtctcctgcaaggcttctggatacaccttcaccggctactatatgcactgggtgcgacaggcccctggacaagggcttgagtggatgggacggatcaaccctaacagtggtgacacaaactatgcacagaagtttcagggcagggtcaccatgaccagggacacgtccatcagcacagcctacatggagctgagcagg

SEQ ID NO: 1720 - DNA, 255 bp, Homo sapiens
  source 1..255: mol_type = other DNA
gaagttgtgttgacgcagtctccaggcaccctgtctttgtctccaggggaaagagccaccctctcctgcagggccagtcagagtgttagcagcagctacttagcctggtaccagcagaaacctggccaggctcccaggctcgtcatctatggtgcatccagcagggccactggcatcccagacaggttcagtggcagtgggtctgggacagacttcactctcaccatcagcagactggagcctgaagattttgca

SEQ ID NO: 1721 - DNA, 255 bp, Homo sapiens
  source 1..255: mol_type = other DNA
caggtgcacctggtgcagtctggggctgaggtgaagaagcctggggcctcagtgaaggtctcctgcaaggcttctggatacaccttcaccggctactatatgaactgggtgcgacaggcccctggacaagggcttgagtggatgggacggatcaaccctaacagtggtggcacaaactatgcacagaagtttcagggcagggtcaccatgaccagggacacgtccatcagcacagcctacatggaactgagcagg

SEQ ID NO: 1722 - DNA, 255 bp, Homo sapiens
  source 1..255: mol_type = other DNA
cagtctgtgctgactcagccaccctcagcgtctgggacccccgggcagagggtcaccatctcttgttctggaagcagctccaacatcggaagtaatactgtaaactggtaccagcagctcccaggaacggcccccaagctcctcatctatagtaataatcagcggccctcaggggtccctgaccgattctctggctccaagtctggcacctcagcctccctggccatcagtgggctccagtctgaggatgaggct

SEQ ID NO: 1723 - DNA, 255 bp, Homo sapiens
  source 1..255: mol_type = other DNA
gaggtgcagctggtgcagtctggagcagaggtgaaaaagcccggggagtctctgaagatctcctgtaagggttctagatacagctttaccagatactggatcgcctgggtgcgccagatgcccgggaaaggcctggagtggatggggatcatctatcctggtgactctgataccagatacagcccgtccttccaaggcccggtcaccatctcagccgacaagtccatcagcaccgcctacctgcagtggagcagc

SEQ ID NO: 1724 - DNA, 255 bp, Homo sapiens
  source 1..255: mol_type = other DNA
gacatccagatgacccagtctccttccaccctgtctgcatctgtaggagacagagtcaccatcacttgccgggccagtcagagtattagtagttggttggcctggtatcagcagaaaccagggaaagcccctaagctcctgatctatgatgcctccagtttggaaagtggggtcccatcaaggttcagcggcagtggatctgggacagaattcactctcaccatcagcagcctgcagcctgatgattttgcaact

SEQ ID NO: 1725 - DNA, 255 bp, Homo sapiens
  source 1..255: mol_type = other DNA
caggtgcagctggtggagtctgggggaggcgtggtccagcctggggggtccgtaagactctcctgtgcagcgtctggattcgacttcactaataatggcatgtattgggtccgccaggctccaggcaaggggctggagtgggtggcatttatacggtatgatggaaataaacaagactatgcagactccgtgaagggccgattcaccatctccagagacaattccaaaaacactctgtatctgcaaatgagcagc

SEQ ID NO: 1726 - DNA, 255 bp, Homo sapiens
  source 1..255: mol_type = other DNA
gaaattgtgttgacgcagtctccaggcaccctgtctttgtctccaggggaaagagccaccctctcctgcagggccagtcagactgttaccagcaggtacttagcctggtatcagcagaagcctggccaggctcccaggctcctcatctatggtgcatccaccagggccactggcatcccagacaggttcagtggcagtgggtctgggacagacttcactctcaccatcagcagactggagcctgaagattttgca

SEQ ID NO: 1727 - DNA, 255 bp, Homo sapiens
  source 1..255: mol_type = other DNA
caggtgcagctggtggagtctgggggaggcgtggtccagcctgggaggtccctgagactctcctgtgcagcctctggattcaccttcagtacctatggcatgcactgggtccgccaggctccaggcaaggggctggagtgggtggcagttatatcatatgatggaagtaataaatattatgcagactccgtgaagggccgattcaccatctccagagacaattccaagaacacgctgtatctgcaaatgaacagc

SEQ ID NO: 1728 - DNA, 255 bp, Homo sapiens
  source 1..255: mol_type = other DNA
gacatccagatgacccagtctccatcctccctgtctgcatctgtaggagacagagtcaccatcacttgccaggcgagtcaggacattagcaactatttaaattggtatcagcagaaaccagggaaagcccctaagctcctgatctacgatgcatcgaatttggaaacaggggtcccatcaaggttcagtggaagtggatctgggacagattttagttttagtatcagcagcctgcagcctgaagatattgcaaca

SEQ ID NO: 1729 - DNA, 255 bp, Homo sapiens
  source 1..255: mol_type = other DNA
caggttcagctggtgcagtctggagctgaggtgaagaagcctggggcctcagtgaaggtctcctgcacggcttctggttacaccgttaccagttatggtatcagctgggtgcgacaggcccctggacaagggcttgagtggatgggatggatcagcacttacaatggtaacacaaactatgcacagaagctccagggcagagtcaccatgaccacagacacatccacgagcacagcctacatggagctgaggagc

SEQ ID NO: 1730 - DNA, 255 bp, Homo sapiens
  source 1..255: mol_type = other DNA
gacatcgtgatgacccagtctccagactccctggctgtgtctctgggcgagagggccaccatcaactgcaagtccagccagagtgttttaaacagctccaacaataagaactacttagcttggtaccagcagaaaccaggacagcctcctaagctgctcatttactgggcatctacccgggaatccggggtccctgaccgattcagtggcagcgggtctgggacagatttcactctcaccatcagcagcctgcag

SEQ ID NO: 1731 - DNA, 255 bp, Homo sapiens
  source 1..255: mol_type = other DNA
gaggtgcagctggtggagtctgggggaggcttggtccagcctggggggtccctgagaatctcttgttcagcctctggattcaccttcagtagatatgctatgcactgggtccgccaggctccagggaagggactggaatatgtttcagctattaggagtaatgggggtagcacatactacgcagactccgtgaggggcagattcaccatctccagagacaattccaggaacacgctgtatcttcaaatgagcagt

SEQ ID NO: 1732 - DNA, 255 bp, Homo sapiens
  source 1..255: mol_type = other DNA
gacatcgtgatgacccagtctccagactccctggctgtgtctctgggcgagagggccaccatcaactgcaagtccagccagagtgttttatacagctccaacaataagaacttcttaacttggtaccagcagaaaccaggacagcctcctaagctgctcatttactgggcatctacccgggaatccggggtccctgaccgattcagtggcagcgggtctgggacagatttcactctcaccatcagcagcctgcag

SEQ ID NO: 1733 - DNA, 255 bp, Homo sapiens
  source 1..255: mol_type = other DNA
caggtgcagctacagcagtggggcgcagggctgttgaagccttcggagaccctgtccctcacctgcgctgtctatggtgggtccttcagtggttacttctggagctggatccgccagcccccagggaaggggctggagtggattggggaaatcaatcatagtggaagcaccaactacaacccgtccctcaagagtcgagtcaccatatcagtagacacgtccaagaaccagttctccctgaagctgagctctgtg

SEQ ID NO: 1734 - DNA, 255 bp, Homo sapiens
  source 1..255: mol_type = other DNA
gacatcgtgatgacccagtctccagactccctggctgtgtctctgggcgagagggccaccatcaactgcaactccagccagagtgttttatacagctccatcaataagaactacttagcttggtaccagcagaaaccagcacagcctcctaaggtgctcatttactgggcatctacccgggaatccggggtccctgaccgattcagtggcagcgggtctgggacagatttcactctcaccatcagcagcctgcag

SEQ ID NO: 1735 - DNA, 255 bp, Homo sapiens
  source 1..255: mol_type = other DNA
caggtccagctggtgcaatctggggctgaggtgaagaagcctgggtcctcggtgaaggtctcctgcaaggcttctggagacaccttcggcagctatagtatcacctgggtgcgacaggcccctggacaaggacttgagtggatgggaaggatcatccctgtccttggtatagcaaactacgcacagaagttccagggcagagtcacgattaccgcggacaaatccacgagcacagcctacatggagctgagcagc

SEQ ID NO: 1736 - DNA, 255 bp, Homo sapiens
  source 1..255: mol_type = other DNA
gaaattgtgttgacgcagtctccaggcaccctgtctttgtctccaggggaaagagccaccctctcctgcagggccagtcagagtgttagcagcaactacttagcctggtaccagcagaaacctggccaggctcccaggctcctcatctatggtgcatccagcagggccactggcatcccagagaggttcagtggcagtgggtctgggacagacttcactctcaccatcagcagactggagcctgaagattttgca

SEQ ID NO: 1737 - DNA, 255 bp, Homo sapiens
  source 1..255: mol_type = other DNA
caggtgcagctgcaggagtcgggcccaggactggtgaagccttcggagaccctgtccctcacctgcactgtctctggtggctccatcagtagttactactggagctggatccggcagcccccagggaagggactggagtggattgggtatatcaattacagggggatcaccaactacaacccctccctcaagagtcgagtcaccatatcagtagacatgtccaagaaccagttctccctgaagctgagctctgtg

SEQ ID NO: 1738 - DNA, 255 bp, Homo sapiens; identical to SEQ ID NO: 1662
  source 1..255: mol_type = other DNA

SEQ ID NO: 1739 - DNA, 255 bp, Homo sapiens
  source 1..255: mol_type = other DNA
caggtgcagctggtgcagtctgggactgaggtgaagaagcctggggcctcagtgaaggtctcctgcaaggcttctggatacaccttcaccgactactatatgcactgggtgcgacaggcccctggacaagggcttgagtggatgggacggatcaaccctaccagtggtggcacaaactatccacagaagtttcagggcagtgtcaccatgaccagggacacgtccctcagcacagtctacatggaactgagcggg

SEQ ID NO: 1740 - DNA, 255 bp, Homo sapiens
  source 1..255: mol_type = other DNA
cagtctgccctgactcagcctgcctccgtgtctgggtctcctggacagtcgatcaccatctcctgcactggaaccaacagtgacgttggtggttataactatgtctcctggtaccaacaacacccaggcaaagcccccagactcatgatttatgatgtcagtaatcggccctcaggggtttctaatcgcttctctggctccaagtctggcaacacggcctccctgaccatctctgggctccaggctgaggacgag

SEQ ID NO: 1741 - DNA, 255 bp, Homo sapiens
  source 1..255: mol_type = other DNA
caggtccagcttgtgcagtctggggctgaggtgaagaagcctggggcctcagtgaaggtttcctgcaaggcttctggatataccttcactacctatgctatgcattgggtgcgccaggcccccggacaaaggcttgagtggatgggatggatcaacgctggcaatggtaacacaaaatattcacagaacttccagggcagagtcaccattaccagggacacatccgcgagcacagcctacatggagctgagcagc

SEQ ID NO: 1742 - DNA, 255 bp, Homo sapiens
  source 1..255: mol_type = other DNA
gacatccagatgacccagtctccttccaccctgtctgcatctgtaggagacagagtcaccatcacttgccgggccagtcagagtattagtagctggttggcctggtatcagcagaaaccagggaaagcccctaagctcctgatctatgatgcctccagtttggaaagtggggtcccatcaaggttcagcggcagtggatctgggacagaattcactctcaccatcagcagcctgcagcctgatgattttgcaact

SEQ ID NO: 1743 - DNA, 255 bp, Homo sapiens
  source 1..255: mol_type = other DNA
caggtccagctggtgcaatctggggctgaggtgaagaagcctgggtcctcggtgaaggtctcctgcaaggcttctggaggcaccttcagcagctatactatcagctgggtgcgacaggcccctggacaaggccttgagtggatgggaaggatcatccctgtccgtgatatagcaaactacgcacagaagttccagggcagagtcacgattaccgcggacaaatccacgaggacagcctacatggaggtgagcagc

SEQ ID NO: 1744 - DNA, 255 bp, Homo sapiens
  source 1..255: mol_type = other DNA
gacatccagatgacccagtctccttccaccctgtctgcatctgtaggagacagagtcaccatcacttgccgggccagtcagagtattagtagctggttggcctggtatcagcagaaaccagggaaagcccctaagctcctgatctatgatgcctccagtttggaaagtggggtcccatcaaggttcagcggcagtggatctgggacagaattcactctcaccgtcagcagcctgcagcctgatgattttgcaact

SEQ ID NO: 1745 - DNA, 255 bp, Homo sapiens
  source 1..255: mol_type = other DNA
caggttcagctggtgcagtctggagctgaggtgaagaagcctggggcctcagtgaaggtctcctgcaaggcttctggttacaccttttccaactacggtatcagctgggtgcgacaggcccctggacaagggcttgagtggatgggatggatcagcgcttacaatggtaacactaagtatccacaaaagctccagggcagagtcaccatgagcacagacacatccacgagcacagcctacatggagctgaggagc

SEQ ID NO: 1746 - DNA, 255 bp, Homo sapiens
  source 1..255: mol_type = other DNA
cagcctgtgctgactcagccaccttctgcatcagcctccctgggagcctcggtcacactcacctgcaccctgagcagcggctacagtaattataaagtggactggtaccagcagagaccagggaagggcccccagtttgtgatgcgagtgggcactggtgggattgtgggatccaagggggatggcatccctgatcgcttctcagtcttgggctcaggcctgaatcggtacctgaccatcaagaacatccaggaa

SEQ ID NO: 1747 - DNA, 255 bp, Homo sapiens
  source 1..255: mol_type = other DNA
gaggtgcagctggtgcagtctggagcagaggtgaaaaagcccggggagtctctgaagatctcctgtaagggttctggatacacctttaccagctactggatcggctgggtgcgccagatgcccgggaaaggcctggagtggatggggatcatctatcttggtgactctgatacgagatacagcccgtccttccaaggccaggtcaccatctcagccgacaagtccatcagcaccgcctacctgcagtggaacagc

SEQ ID NO: 1748 - DNA, 255 bp, Homo sapiens
  source 1..255: mol_type = other DNA
gacatccagatgacccagtctccttccaccctgtctgcatctgtaggagagagagtcaccatcacttgccgggccagtcagagtattagtaggtggttggcctggtatcagcagaaaccagggaaagcccctaaactccttatctatgatgcctccagtttggaaagtggggtcccatcaaggttcagcggcagtggatctgggacagaattcactctcaccatcagcagcctgcagcctgatgattttgcaact

SEQ ID NO: 1749 - DNA, 255 bp, Homo sapiens
  source 1..255: mol_type = other DNA
gaggtgcagctggtggagtctgggggagacgtggtccagcctggggggtccctgagactctcctgtgcagcctctggaattacctttagtaactattggatgacctgggtccgccaggctccagggaaagggctggagtgggtggccaccataaagaaggatggaggggagcagtactatgtggactctgtgaagggccgattcaccatctccagagacaacgccaggaattcactgtatctacaaataaacagc

SEQ ID NO: 1750 - DNA, 255 bp, Homo sapiens
  source 1..255: mol_type = other DNA
gaaattgtgttgacgcagtctccaggcaccctgtctttgtctccaggggaaagagccaccctctcctgcagggccagtcagagtattagcaacagctacttagtctggtaccagcagaaacctggccaggctcccaggctcctcatctatggtgcatccaccagggccactggcatcccagacaggttcagtggcagtgggtctgggacagacttcactctcaccatcagcagactggagcctgaagattttgca

SEQ ID NO: 1751 - DNA, 255 bp, Homo sapiens
  source 1..255: mol_type = other DNA
gaggtgcagctggtggagtctgggggaggcctggtcaagcctggggggtccctgagactctcctgtgcagcctctggattcaccttcagtagctatagcatgaactgggtccgccaggctccagggaaggggctggagtgggtctcgtccattagtagtagtagtagttacatatactacgcagactcagtgaagggccgattcaccatctccagagacaacgccaagaattcactgtatctgcaactgaacagc

SEQ ID NO: 1752 - DNA, 255 bp, Homo sapiens
  source 1..255: mol_type = other DNA
cagtctgtgctgactcagccaccctcagcgtctgggacccccgggcagagggtcaccatctcttgttctggaagcagctccaacatcgaacataattatgtattctggtaccagcaactcccaggaacggcccccaaactcctcatctatagtaataatcaccggccctcaggggtccctgaccgattctctggctccaagtctggcacctcagcctccctggccatcagtgggctccggtccgaggatgaggct

SEQ ID NO: 1753 - DNA, 255 bp, Homo sapiens
  source 1..255: mol_type = other DNA
gaggtgcagctggtggagtctgggggaggcttggtacagcctggggggtccctgagactctcctgtgcagcctctggattcacctttagcagctatgccatgagttgggtccgccaggctccagggaaggggctggagtgggtctcagctattagtggtagtggtggtagcacatactacgcagactccgtgaagggccggttcaccatctccagagccaattccaagaacacgctgtatctgcaaatgaacagc

SEQ ID NO: 1754 - DNA, 255 bp, Homo sapiens
  source 1..255: mol_type = other DNA
gacatccagatgacccagtctccttccaccctgtctgcatctgtaggagacagagtcaccatcacttgccgggccagtcagagtattactagctggttggcctggtatcagcagaaaccagggaaagcccctaagctcctgatctatgatgcctccaatttggaaagtggggtcccatcaaggttcagcggcagtggatctgggacagaattcactctcaccatcagcagcctgcagcctgatgattttgcaact

SEQ ID NO: 1755 - DNA, 255 bp, Homo sapiens
  source 1..255: mol_type = other DNA
caggtccagctggtgcaatctggggctgaggtgaagaagcctgggtcctcggtgaaggtctcctgcaaggcttctggaggcaccttcagcagatatactatcagctgggtgcgacaggcccctggacaagggcttgagtggatgggaaggatcatccctatacttggtacagcaaactacgcacagaatttccagggcagagtcacgattaccgcggacaaatccacgagcacagcctacatggagctgagtagc

SEQ ID NO: 1756 - DNA, 255 bp, Homo sapiens
  source 1..255: mol_type = other DNA
gacatcgtgatgacccagtctccagactccctgactgtgtctctgggcgagagggccaccatcaactgcaagtccagccagagtgttttatacagctccaacaataagaactacttagcttggtaccagcagaaaccaggacagcctcctaagctgctcatttactgggcatctacccgggaatccggggtccctgaccgattcagtggcagcggctctgggacagatttcactctcaccgtcagcagcctgcag

SEQ ID NO: 1757 - DNA, 255 bp, Homo sapiens
  source 1..255: mol_type = other DNA
caggtgcggctgcaggagtcgggcccaggactggtgaagccttcacagaccctgtccctcacctgcactgtctctggtggctccatcagcagtggtagttactactggagctggatccggcagcccgccgggaagggactggagtggattgggcgtttccataccagtgggagcaccaactacaatccctccctcaagagtcgagtcaccatatcagtagacacgtccaagaaccagttctccctgaagctgagt

SEQ ID NO: 1758 - DNA, 255 bp, Homo sapiens
  source 1..255: mol_type = other DNA
cagtctgccctgactcagcctgcctccgtgtctgggtctcctggacagtcgatcaccatctcctgcactggaaccagcagtgacgttggtgcttataactatgtctcctggtaccaacagcacccaggcaaagcccccaaactcatgatttatgaggtcagtaatcggccctcaggggtttctaatcgcttctctggctccaagtctggcaacacggcctccctgaccatctctgggctccaggctgaggacgag

SEQ ID NO: 1759 - DNA, 255 bp, Homo sapiens
  source 1..255: mol_type = other DNA
gaggtgcagctggtggagtctgggggaggcttggtccagcctggggggtccctgagactctcctgtgcagcctctggactcacctttagtagctattggatgagctgggcccgccaggctccagggaaggggctggagtgggtggccaatataaagaaagatggaagtgagaaatactatgtggactctgtgaagggccgattcaccatctccagagacaacgccaagaactcactgtatctgcaaatgaacagc

SEQ ID NO: 1760 - DNA, 255 bp, Homo sapiens
  source 1..255: mol_type = other DNA
tcctatgtgctgactcagccaccctcagtgtcagtggccccaggaaagacggccaggattacctgtgggggaaacaacattggaagtaaaagtgtgcactggtaccagcagaggccaggccaggcccctgtactggtcatctattatgatagcgaccggccctcagggatccctgagcgattctctggctccaactctgggaacacggccaccctgaccatcagcagggtcgaggccggggatgaggccgactat

SEQ ID NO: 1761 - DNA, 255 bp, Homo sapiens
  source 1..255: mol_type = other DNA
caggtgcagctggtgcagtctggggctgaggtgaagaagcctggggcctcagtgaaggtctcctgcaaggcttctggatacatcttcaccggctattatatgcactgggtgcgacaggcccctggacaagggcttgagtggatgggatggatcaaccctaacagtggtggcactaactatgcacagaagtttcagggcagggtcaccatgaccagggacacgtccatcaccacagcctacatggagctgagcagg

SEQ ID NO: 1762 - DNA, 255 bp, Homo sapiens
  source 1..255: mol_type = other DNA
cagtctgccctgactcagcctccctccgcgtccgggtctcctggacagtcagtcaccatctcctgcactggaaccagcagtgacgttggtggttataactatgtctcctggtaccaacagcacccaggcaaagcccccaaactcatgatttatgaggtcagtaagcggccctcaggggtccctgatcgcttctctggctccaagtctggcaacacggcctccctgaccgtctctgggctccaggctgaggatgag

SEQ ID NO: 1763 - DNA, 255 bp, Homo sapiens; identical to SEQ ID NO: 1661
  source 1..255: mol_type = other DNA

SEQ ID NO: 1764 - DNA, 255 bp, Homo sapiens
  source 1..255: mol_type = other DNA
gacatccagatgacccagtctccatcctccctgtctgcatctgtaggagacagagtcaccatcacttgccgggcaagtcagagcattcgcagctatttaaattggtatcagcagaaaccagggaaagcccctaagctcctgatctatgctgcatccagtttgcaaagtggcgtcccatcaaggttcagtggcagtggatctgggacagatttcactctcaccatcggcagtctgcaacctgaagattttgcaact

SEQ ID NO: 1765 - DNA, 255 bp, Homo sapiens
  source 1..255: mol_type = other DNA
caggtgcagctggtgcagtctggggctgaggtgaagaagcctggggcctcagtgaaggtctcctgcaaggcttctggatacaccttcaccggctactatatgcactgggtgcgacaggcccctggacaagggcttgagtggatgggatggatcaaccctaacagtggtggcacaaactatgcacagaagtttcagggcagggtcaccatgaccagggacacgtccatcaacacagcctacatggagctgagcagg

SEQ ID NO: 1766 - DNA, 255 bp, Homo sapiens
  source 1..255: mol_type = other DNA
cagtctgccctgactcaacctccctccgcgtccgggtctcctggacagtcagtcaccatctcctgcactggaaccagcagtgacgttggtggttataactatgtctcctggtaccagcaacacccaggcaaagcccccaaactcatgatttatgaggtcaataagcggccctcaggggtccctgatcgcttctctggctccaagtctggcaacacggcctccctgaccgtctctgggctccaggctgacgatgag

SEQ ID NO: 1767 - DNA, 255 bp, Homo sapiens
  source 1..255: mol_type = other DNA
caggtgctcctggtgcagtctggggctgaggtgaagaagcctggggcctcagtgaaggtctcctgcaaggcttctggatacaccttcaccggctactatctgcactgggtgcgacaggcccctggacaagggcttgagtggatgggatggatcaaccctatcagtggtggcacaaactatgcacagaattttcaggacagggtcaccatgaccagggacacgtccatcatcacagcctacatggaactgagcagg

SEQ ID NO: 1768 - DNA, 255 bp, Homo sapiens
  source 1..255: mol_type = other DNA
cagtctgccctgactcagcctgcctccgtgtctgggtctcctggacagtcgatcaccatctcctgcactggaaccagcagtgacgttggtggttataactatgtctcctggtaccaacagcacccaggcaaagcccccaaactcatgatttatgaggtcagtaatcggccctcaggggtttctgatcgcttctctggctccaagtctggcaacacggcctccctgaccatctctgggctccaggctgaggacgag

SEQ ID NO: 1769 - DNA, 255 bp, Homo sapiens
  source 1..255: mol_type = other DNA
caggtgcagctggtggagtctgggggaggcgtggtccagcctgggaggtccctgagactctcctgtgcagcgtctggattcaccttcagttactatggcatgcactgggtccgccaggctccaggcaaggggctggagtgggtggcagttatatggtatgatggaagtaataaacactatgcagactccgtgaagggccgattcaccatctccagagacaattccaagaacacgctgtatctgcaaatgaacagc

SEQ ID NO: 1770 - DNA, 255 bp, Homo sapiens
  source 1..255: mol_type = other DNA
gacatccagatgacccagtctccatcctccctgtctgcatctgtaggagacagagtcaccatcacttgccaggcgagtcaggacattaacaactatttaaattggtatcagcagaaaccagggaaagcccctaagctcctgatctacgatgcatccaatttggaaacaggggtcccatcaaggttcagtgggagtggatctgggacagattttactttcaccatcagcagcctgcagcctgaagatattgcaaca

SEQ ID NO: 1771 - DNA, 255 bp, Homo sapiens
  source 1..255: mol_type = other DNA
caggtccagctggtgcagtctggggctgaggtgaagaagcctgggtcctcggtgaaggtctcctgcaaggcttctggaggcaccttcagcagctatgctatcagctgggtgcgacaggcccctggacaagggcttgagtggatgggagggatcatccctatctttggtacagcaaagtacgcacagaagttccagggcagagtcacgattaccgcggacgaatccacgagcacagcctacatggagctgagcagc

SEQ ID NO: 1772 - DNA, 255 bp, Homo sapiens; identical to SEQ ID NO: 1762
  source 1..255: mol_type = other DNA

SEQ ID NO: 1773 - DNA, 255 bp, Homo sapiens
  source 1..255: mol_type = other DNA
gaggtgcagctggtggagtctgggggaggcttggtccagcccggggggtccctgagactctcctgcgtagcctctggattcaccttcagtgactatgctatgcactgggtccgccaggctccagggaagggactggaatatattgcagctattagtagcaatgggggtaggacatattatgcagactctgtgaaggacaaattcaccatctccagagacaattccaagaacatcttgtatcttcacatgggcagc

SEQ ID NO: 1774 - DNA, 255 bp, Homo sapiens
  source 1..255: mol_type = other DNA
cagtctgccctgactcagcctgcctccgtgtctgggtctcctggacagtcgatcaccatctcctgcactggaaccagcagtgacattggtggttataactatgtctcctggtaccaacaacacccaggcaaagcccccaaactcatcatttctgatgtctctaatcggccctcaggggtttctagtcgcttctctggctccaagtctggcaacacggcctccctgaccatctctggactccagactgaggacgag

SEQ ID NO: 1775 - DNA, 255 bp, Homo sapiens
  source 1..255: mol_type = other DNA
caggtgcagctggtgcagtctggggctgaggtgaagaagcctggggcctcagtgaaggtctcctgcaaggcttctggatacaccttcaccggctactatatgcactgggtgcgtcaggcccctggacaagggcttgagtggatgggatggatcaaccctaacagtggtgccataaactatgcacagaagtttcagggcagggtcaccatgaccagggacacgtccatcagcacagcctacatggagctgagcagc

SEQ ID NO: 1776 - DNA, 255 bp, Homo sapiens
  source 1..255: mol_type = other DNA
cagtctgccctgactcagcctccctccgcgtccgggtctcctggacagtcagtcaccatctcctgcactggaaccagcagtgacgttggtggttataactttgtctcctggtaccaacagcacccaggcaaagcccccaaactcatgatttatgaggtcagtaagcggccctcaggggtccctgatcgcttctctggctccaagtctggcaacacggcctccctgaccgtctctgggctccaggctgaggatgag

SEQ ID NO: 1777 - DNA, 255 bp, Homo sapiens
  source 1..255: mol_type = other DNA
caggtgcagctgcaggagtcgggcccaggactggtgaagccttcggagaccctgtccctcacctgcactgtctctggtggctccatcagtagttactactggagctggatccggcagcccccagggaagggactggagtggattgggtatatctattacagtgggagcaccaagtacaacccctccctcaagagtcgagtcaccatatcagtagacacgtccaagaagcagttctccctgaagttgagctctgtg

SEQ ID NO: 1778 - DNA, 255 bp, Homo sapiens
  source 1..255: mol_type = other DNA
gacattcagatgacccagtctccatcctccctgtctgcatctataggagacagagtcaccatcacttgccgggcaagtcagagcattagcacctatttaaattggtatcagcagaaaccagggaaagcccctaaactcctgatctatgctgcatccagtttgcaaagtggggtcccatcaaggttcagtggcagtggatctggggcagatttcactctcaccatcagcagtctgcaacctgaagattttgcaact

SEQ ID NO: 1779 - DNA, 255 bp, Homo sapiens
  source 1..255: mol_type = other DNA
caggtgcagctggtgcagtctggggctgaggtgaagaagcctggggcctcagtgaaggtctcctgcaaggcttctggatacaccttcaccggctactatatgcactgggtgcgacaggcccctggacaagggcttgagtggatgggatggatcaaccctaacagtggtggcacaaactatgcacagaagtttcagggcagggtcaccatgaccagggacacgtccatcagcacagcctacatggagctgagcagg

SEQ ID NO: 1780 - DNA, 255 bp, Homo sapiens; identical to SEQ ID NO: 1616
  source 1..255: mol_type = other DNA

SEQ ID NO: 1781 - DNA, 255 bp, Homo sapiens
  source 1..255: mol_type = other DNA
caggtgcagctggtggagtctgggggaggcttggtcaagcctggagggtccctgagactctcctgtgcagcctctggattcaccttcagtgactactacatgagctggatccgccaggctccagggaaggggctggagtgggtttcatacattagtattagtgatacgaccatatactacgcagacgctgtgcagggccgattcaccatgtccagggacaacgccaagaactcactgtatctgcaaatgaacagc

SEQ ID NO: 1782 - DNA, 255 bp, Homo sapiens
  source 1..255: mol_type = other DNA
gacatccagatgacccagtctccttccaccctgtctgcatctgtaggagacagagtcaccatcacttgccgggccagtcagagtatttttagctggttggcctggtatcagcagaaaccagggaaagcccctaagctcctgatctatgatgcctccagtttggaaagtggggtcccatcaaggttcagcggcagtggatctgggacagaattcactctcaccatcagcagcctgcagcctgatgattttgcaact

SEQ ID NO: 1783 - DNA, 255 bp, Homo sapiens
  source 1..255: mol_type = other DNA
caggtgcagttggtggagtctgggggaggcgtggtccagcctggaaggtccctgagactctcctgtgcagcgtctggattcaccttcagaaactttggcatgcactgggtccgccaggctccaggcaaggggctggagtgggtggcatttatatggactgctgaaagtgataaattctatgcagactccgtgaagggccgattcaccgtctccagagacaattcgaagaacacgctgtatttggaaatgaacagc

SEQ ID NO: 1784 - DNA, 255 bp, Homo sapiens
  source 1..255: mol_type = other DNA
gaaattgtgttgacacagtctccagccaccctgtctttgtctccaggggaaagagccaccctctcctgcagggccagtcagagtgttagcacctccttagcctggtaccaacagaaatgtggccaggctccccggctcctcatctatgatgcatccaacagggccactggcatcccagccaggttcagtggcagtgggtctgggacagacttcactctcaccatcagcagcctagagcctgaagattttgcagtt

SEQ ID NO: 1785 - DNA, 255 bp, Homo sapiens
  source 1..255: mol_type = other DNA
caggtccagctggtacagtctggggctgaggtgaagaagcctggggcctcagtgaaggtctcctgcaaggtttccggatacaccctcactgaattatccatgcactgggtgcgacaggctcctggaaaagggcttgagtggatgggaggttttgatcctgaagatggtgaaacaatctacgcacagaagttccagggcagagtcaccatgaccgaagacacatctacagacacagcctacatggagctgagcagc

SEQ ID NO: 1786 - DNA, 255 bp, Homo sapiens
  source 1..255: mol_type = other DNA
gaaatagtgatgacgcagtctccagccaccctgtctgtgtctccaggggaaagagccaccctctcctgcagggccagtcagagtattactagcaacttagcctggtaccagcagaaacctggccaggctcccaggctcctcatctatggtgcatccaccagggccactggtatcccagccaggttcagtggcagtgggtctgggacagagttcactctcaccatcagcaacctgcagtctgaagattttgcagtt

SEQ ID NO: 1787 - DNA, 255 bp, Homo sapiens
  source 1..255: mol_type = other DNA
caggtccagctggtacagtctggggctgaggtgaagaagcctggggcctcagtgaaggtctcctgcaaggtttccggatacaccctcactgaattatccatgcactgggtgcggcaggctcctggaaaagggcttgagtggatgggaggttttgatcctgaagatgctgaaacaatctacgcacagaagttccagggcagagtcaccatgaccgaggacacatctacagacacagcctacatggagctgagcagc

SEQ ID NO: 1788 - DNA, 255 bp, Homo sapiens
  source 1..255: mol_type = other DNA
gaaatagtgatgacgcagtctccagccaccctgtctgtgtctccaggggaaagagccaccctctcctgcagggccagtcagaatgttagcagcaacttagcctggtaccaacagaaacctggccaggctcccaggctcctcatctatggtgcatccaccagggccactggtatcccggccaggttcagtggcagtgggtctgggacagagttcactctcaccatcagcagcctgcagtctgaagattttgcagtt

SEQ ID NO: 1789 - DNA, 255 bp, Homo sapiens
  source 1..255: mol_type = other DNA
caggtgcagatggtggagtctgggggaggcgtggtccagcctggggggtccctgagactctcctgtgcggtctctggcttcaccttcaacaactttggcatgcactgggtccgccaggctccaggcaaggggctggagtgggtggcatttatttcatatgaaggaagtaaaaagtcttatgcagactccgtgaagggccgattcaccatctccagagacagttccaagaacacgttgtatctgcaaatgaacagc

SEQ ID NO: 1790 - DNA, 255 bp, Homo sapiens
  source 1..255: mol_type = other DNA
gtctgccctgactcagcctgcctccgtgtctgggtctcctggacagtcgatcaccatctcctgcactggaatctacagtgatgttgatgattatacttctgtctcctggtaccaacaacacccaggcaaagcccccacactcattatttatgatgtcactaagcggccctcaggggtttccaatcgtttctctgcctccaactctgacaataccgcctccctgacaatctctgggctccaggctgaggacgaggc

SEQ ID NO: 1791 - DNA, 255 bp, Homo sapiens
  source 1..255: mol_type = other DNA
caagtgcagctgcaggaatcgggcccaggactggtgaagccttcggagaccctgtccctcacctgcaatgtctcaggtggctccgtcaaatttttctattggagttggatccggcagccccccgggaagggactggagtggattggatatatctattacagtgggagcaccaactacaacccctccctcaagagtcgagtgaccatgtcagtggactcgcccaacaaccaattctccctgaaactgaggtctgtg

SEQ ID NO: 1792 - DNA, 255 bp, Homo sapiens
  source 1..255: mol_type = other DNA
cagtctgtgctgacgcagccgccctcgctgtctggggccccagggcagagggtcaccatctcctgcactgggagccgctccaacatcggggctggctatgctgtccactggtaccagcaacttccaggaacagcccccaaactcctcatctccgagaacaccaatgggccctcaggagtccctgaccgattctctgggtccaagtctgactcctcggcctccctggccatcaccgacctccaggctgcggatgag

SEQ ID NO: 1793 - DNA, 255 bp, Homo sapiens
  source 1..255: mol_type = other DNA
caggtcaccttgaaggagtctggtcctgtgctggtgaaacccacagagaccctcacgctgacctgcaccgtctctgggttctcacccagcaatgctagaatgggtgtgagctggatccgtcagcccccagggaaggccctggaatggcttgcacacgtgtattcgaatgacgagaaatcgtacagcacatctctgaagaggaggctcaccatctccaaggacacctccaaacggcaggtggtccttattatgacc

SEQ ID NO: 1794 - DNA, 255 bp, Homo sapiens
  source 1..255: mol_type = other DNA
gacatccagatgacccagtctccatcctccctgtctgcatttgtgggagacagagttaccatcagttgccgggcaagtcagagcattgtcagctatttaaattggtatcagcagaaaccagggaaagcccctaagctccttttgtatagtgcatccactttgcaaagtggggtcccatcaaggttcagtggcagtggatctgggacagatttcactctcaccatcagcagtctgcaacctgaagattttgcaact

SEQ ID NO: 1795 - DNA, 255 bp, Homo sapiens
  source 1..255: mol_type = other DNA
gaggtgcagctgttggagtctgggggaggcttggtactgcctggggggtccctgagactctcctgtgcagcctctggattcagctttagcagctatgccatgagctgggtccgccaggctccagggaaggggctggagtgggtctcaggtattagtggtcgtggtactagcacatactacgcagactccgtgaagggccggttcaccatctccagagacaattccaagaacacgctgtatctgcaaatgaacagc

SEQ ID NO: 1796 - DNA, 255 bp, Homo sapiens
  source 1..255: mol_type = other DNA
gacattgtgttgacgcagtctccagccaccctgtctttgtctccaggggaaagagccaccctctcctgcggggccagtcagagtgttagcagcaactacttagcctggtaccagcaggaacctggcctggcgcccaggctcctcatctatgatgcatccagcagggccactggcatcccagacaggttcagtggcagtgggtctgggacagacttcactctcaccatcagcagactggagcctgaagattttgca

SEQ ID NO: 1797 - DNA, 255 bp, Homo sapiens; identical to SEQ ID NO: 1681
  source 1..255: mol_type = other DNA

SEQ ID NO: 1798 - DNA, 255 bp, Homo sapiens
  source 1..255: mol_type = other DNA
gccatccagatgacccagtctccatcctccctgtctgcatctgtaggagacagagtcaccatcacttgccgggcaagtcagggcattagaaatgatttaggctggtatcagcagaaaccagggaaagcccctaagctcctgatctatgctgcatccagtttacaaagtggggtcccatcaaggttcagcggcagtggatctggcacagatttcactctcaccatcagcagcctgcagcctgaagattttgcaact

SEQ ID NO: 1799 - DNA, 255 bp, Homo sapiens
  source 1..255: mol_type = other DNA
gaggtgcagctgttggagtctgggggaggcttggtacagcctggggggtccctgagactctcctgtgcagtctctggattcaccgttagtaactatggcctgagctgggtccgccagggtccagggaaggggctagagtgggtcgcagctattagtggtagtggtggtaggacatactatgcagactccgtgaagggccggttcaccatctccagagacaattccaagaacacgctgtttctgcaattgaacagc

SEQ ID NO: 1800 - DNA, 255 bp, Homo sapiens
  source 1..255: mol_type = other DNA
gacatccagatgacccagtctccatcctccctgtctgcatctgtaggggacagagtcaccatcacttgccgggcaaatcagaacattaggagctatttaaattggtatcagcagacaccagggaaagcccctaaactcctgatctatgctacatccagtttgcaaagtggggtcccatcaaggttcagtggcagtggatctgggacacagttcactctcaccatcagcagtctgcaacctgaagattttgcaact

SEQ ID NO: 1801 - DNA, 255 bp, Homo sapiens
  source 1..255: mol_type = other DNA
gaggtgcagctgttggagtctgggggagacttagtacagcctggggggtccctgagactctcctgtgtagcctctggattcacctttaggagttatgccatgacctgggtccgccaggctccagggaaggggctggagtgggtctcaagtattagtggtagtggtggcggcacatactacgcagactccgtgaagggccggttcaccatctccagagacaattccaagaacacgctgtttctgcaaatgaacagc

SEQ ID NO: 1802 - DNA, 255 bp, Homo sapiens
  source 1..255: mol_type = other DNA
gacatccagatgacccagtctccatcctccctgtctgcatctgtaggagacagagtccccatcacttgccgggcaagtcagagcattagcagctatttaaattggtatcagcagagaccagggaaagcccctaagctcctgatctatgctgcatccagtttgcaaagtggggtcccatcaaggttcagtggcagtggatctgggacagatttcactctcaccatcagcagtctgcaacctgaagattttgcaact

SEQ ID NO: 1803 - DNA, 255 bp, Homo sapiens
  source 1..255: mol_type = other DNA
gaggtgcagctggtggagtctgggggaggcttggtccagcctggggggtccctgagactctcctgtgcagcctctggattcacctttggtagctattggatgaactgggtccgccaggctccagggaaggggctggagtgggtggccaacataaacgaagatggaagtgagaaatactatgtggactctgtgaagggccgattcaccatctccagagacaacgccaagaactcactatatctgcaaatgaacagc

SEQ ID NO: 1804 - DNA, 255 bp, Homo sapiens
  source 1..255: mol_type = other DNA
tcttctgagctgactcaggaccctgctgtgtctgtggccttgggacagacagtcaggatcacatgccaaggagacagcctcagaagctattctgcaagctggtaccagcagaagccaggacaggcccctgtacttgtcatctatattaaaaacaaacgaccctcagggatcccagaccgattctctggctccagctcaggaaacacagcttccttgaccatcactggggctcaggcggaagatgaggctgactat

SEQ ID NO: 1805 - DNA, 255 bp, Homo sapiens
  source 1..255: mol_type = other DNA
gaggtgcagctggtggagtctgggggaggcttggtacagcctggggggtccctgagactctcctgtgcagcctctggattcaccttcagtagctatagcatgaactgggtccgccaggctccagggaaggggctggagtgggtttcatacattagtagtagtagtagtaccatatactacgcagactctgtgaagggccgattcaccatctccagagacaacgccaagaactcactgtatctgcaaatgaacagc

SEQ ID NO: 1806 - DNA, 255 bp, Homo sapiens
  source 1..255: mol_type = other DNA
gaaattgtgttgacgcagtctccaggcaccctgtctttgtctccaggggaaagagccaccctctcctgcagggccagtcagagtgttagcagcagctacttagcctggtaccagcagaaacctggccaggctcccaggctcctcatctatggtgcatccagcagggccactggcatcccagacaggttcagtggcagtgggtctgggacagacttcactctcaccatcagcagactggagcctgaagattttgca

SEQ ID NO: 1807 - DNA, 255 bp, Homo sapiens
  source 1..255: mol_type = other DNA
caggtgcagctggtggagtctgggggaggcgtggtccagcctgggaggtccctgagactctcctgtgcagcctctggattcaccttcagtagcaatgctatgcactgggtccgccaggctccaggcaaggggctagagtgggtggcagttatatcatatgatggagataataaatactacgcagactccgtgaagggccgattcaccatctccagagacaattccaagaatacgctgtatctgcaaatgaacagc

SEQ ID NO: 1808 - DNA, 255 bp, Homo sapiens
  source 1..255: mol_type = other DNA
gaaattgtgttgacgcagtctccaggcaccctgtctttgtctccaggggaaagagccaccctctcctgcagggccagtcagagtgttagcagcagctacttagcctggtaccagcagaaacctggccaggctcccaggctcctcatctatggtgcatccagcagggccgctggcatcccagacaggttcagtggcagtgggtctgggacagacttcactctcaccatcagcagactggagcctgaagattttgca

SEQ ID NO: 1809 - DNA, 255 bp, Homo sapiens
  source 1..255: mol_type = other DNA
gaggtgcaactggtggagtctgggggaggcttggtacagcctggggggtccctgagactctcctgtgcggcctctggattcaccttcagtggctatatcatgaactgggtccgccaggctccagggaagggactggagtgggtttcatccatcagtggtggtagtatttccatatcctacgcaggctctgtgaagggccgattcaccatctcccgagacaatgccaagaactcactgtatctgcaaatgaacagc

SEQ ID NO: 1810 - DNA, 255 bp, Homo sapiens
  source 1..255: mol_type = other DNA
cagtctgtgctgacgcagccgccctcagtgtctggggccccagggcagagggtcaccatctcctgcactgggagcagctccaacatcggggcaggttatgatgtacactggtaccagcagcttccaggaacagcccccaaactcctcatctatggtaacagtaatcggccctcaggggtccctgaccgattctctggctccaagtctggcacctcagcctccctggccatcactgggctccaggctgaggatgag

SEQ ID NO: 1811 - DNA, 255 bp, Homo sapiens
  source 1..255: mol_type = other DNA
caggtccagctggtgcagtctggggctgaggtgaagaagcctggatcctcggtgaaggtctcctgcaaggcttctggaggcaccttcagcaactatgctatcagctgggtgcgacaggcccctggaccagggcttgagtggatgggagggatcatccctttccttggtatagcaaactacgcacagaagttccagggcagagtcacgattaccgcggacaaatccacgagcacagcctacatggagctgagcagc

SEQ ID NO: 1812 - DNA, 255 bp, Homo sapiens
  source 1..255: mol_type = other DNA
cagtctgtgctgacgcagccgccctcagtgtctggggccccagggcagagggtcaccatctcctgcactgggagcagctccaacatcggggcaggttatgatgtacactggtaccagcaacttccaggagcagcccccaaactcctcatctatgcaaacagcaatcggccctcaggggtccctgaccgattctctggctccaagtctggcacctcagcctccctggccatcactgggctccaggctgaggatgag

SEQ ID NO: 1813 - DNA, 255 bp, Homo sapiens
  source 1..255: mol_type = other DNA
caggtgcagctgcaggagtcgggcccaggactggtggagccttcacagaccctgtccctcacctgcactgtctctggtggctccatcagcagtggtggttactactggagttggatccgccagcacccagggaagggcctggagtggatcgggtacatctcttacagtggtggaagcacctactacaacccgtccctcaagagtgtagttaccatatcactagacacgtctaagaatcagttctccctgaagctg

SEQ ID NO: 1814 - DNA, 255 bp, Homo sapiens
  source 1..255: mol_type = other DNA
cagtctgccctgactcagcctcgctcagtgtccgggtctcctggacagtcagtcaccatctcctgcactggaaccagcagtgatgttggtggttataactatttctcctggtaccaacaccacgcaggcaaagcccccaaactcatgatttatgatgtcagtaagcggccctcaggggtccctgatcgcttctctggctccaagtctggcaacacggcctccctgaccatctctggcctccaggctgaggatgag

SEQ ID NO: 1815 - DNA, 255 bp, Homo sapiens
  source 1..255: mol_type = other DNA
caggtgcagctgcaggagtcgggcccaggactggtgaagccttcggagaccctgtccctcacctgcactgtctctggtggctccatcaatagttactcctggagctggatccggcagcccgccgggaagggactggagtggattgggcgtatctctaccagtgggagcaccaacaacaacccctccctcaagagtcgagtcaccatgtcagtagacacgtccaaggaccagttctccctgaagctgacctctgtg

SEQ ID NO: 1816 - DNA, 255 bp, Homo sapiens
  source 1..255: mol_type = other DNA
gacatccagatgacccagtctccatcctccctgtctgcatctgtaggagacagagtcaccatcacttgccgggcaagtcagagcattagcaactatttaaattggtatcagcagaaaccagggaaagcccctaagctcctgatctatgctgcatccagtttgcaaagtggggtcccatcaaggttcagtggcagtggatctgggacagatttcactctcaccatcagcagtctgcaacctgaagattttgcaact

SEQ ID NO: 1817 - DNA, 255 bp, Homo sapiens
  source 1..255: mol_type = other DNA
gaagtgcagctggtggagtctgggggaggcttggtacagcccggcaggtccctgagactctcctgtgcagcctctggattcacctttgatgattttgccatgcactgggtccggcaagctccagggaagggcctggagtgggtctcaggtattagttggaatggtggtatcataggctatgcggactctgtgaaggcccgattcaccatctccagagacaacgccaagaactccctgtatctgcaaatgaacagt

SEQ ID NO: 1818 - DNA, 255 bp, Homo sapiens
  source 1..255: mol_type = other DNA
gacatccagatgacccagtctccatcctccctgtctgcatctgtaggagacagagtcaccatcacttgccaggcgagtcaggacattagcaactatttaaattggtatcagaagaaaccagggaaagcccctaagctcctgatctacgatgcaaccaatttggaaacaggggtcccatcaaggttcagtggaagtggatctgggacagagtttactttcaccatcagcagcctgcagcctgaagatattgcaaca

SEQ ID NO: 1819 - DNA, 255 bp, Homo sapiens
  source 1..255: mol_type = other DNA
gagccgcagctggtggaatctgggggaggcttggtacagccgggggggtccctgagactctcctgtgcaggctctggattcggcttcatatcttaccccatgaactgggtccgccaggctccaggaaaggggccggagtggatttcaaatattaggacaaccgctgaaggtggaaccttttacgcagactctgtgaagggccgattcaccatgtccagagacgacggcaagacttcaatatatcttcaaatgaac

SEQ ID NO: 1820 - DNA, 255 bp, Homo sapiens
  source 1..255: mol_type = other DNA
cagtctgccctgactcagcctcgctcagtgtccgggtctcctggacagtcagtcaccatctcctgcactggaaccagtagtgatgttggtggttataactatgtctcctggtatcaacaacgcccagggaaagcccccgaattgatgatttatcatgtcagtgagcggccctcaggggtccctgatcgcttctctggctccaaatctggcaacacggcctccctgaccatctctaggctccaggctgaggatgag

SEQ ID NO: 1821 - DNA, 255 bp, Homo sapiens
  source 1..255: mol_type = other DNA
caggtgcaactgcaggagtcgggcccaggactggtgaagccttcacagaccctgtccctcacctgcactgtctctggtggctccatcagcagtggtgattactactggagctggatccgccagcccccagggaagggcctggagtggcttgggtacatctattacagtgggagcaccttctacaacccgtccctcaagagtcgagttaccatatcagtagacacgtccaagaaccagttctccctgaggctgacc

SEQ ID NO: 1822 - DNA, 255 bp, Homo sapiens
  source 1..255: mol_type = other DNA
gacatcgtgatgacccagtctccagactccctggctgtgtctctgggcgagagggccaccatcaactgcaagtccagccagagtgttttgtacagccccaacaataagaactacttagcttggtaccagcagaaaccaggacagcctcctaacctgctcatctactgggcatctacccgggaatccggggtccctgaccgattcagtggcagcgggtctgggacagatttcactctcaccatcaacagcctgcag

SEQ ID NO: 1823 - DNA, 255 bp, Homo sapiens
  source 1..255: mol_type = other DNA
caggtcaccttgaaggagtctggtcctgtgctggtgaaacccacagagaccctcacgctgacctgcaccgtctctgggttctcactcatcaatgctaggttgggtgtgagctggatccgtcagcccccagggaaggccctggagtggcttgcacacattttttcggatgacgagaaatcctacagcacatctctgaagagcaggctcaccatctccaaggacacctccaagagccaggtggtccttaccatgacc

SEQ ID NO: 1824 - DNA, 255 bp, Homo sapiens
  source 1..255: mol_type = other DNA
cagtctgccctgactcagcctgtctccgtgtctgggtctcctggacagtcgatcaccatctcctgcactggaaccagcagtgacgttggtggttataactatgtctcctggtaccaacagcacccaggcaaagcccccaaactcatgatttctgaggtcagtaatcgaccctcaggggtttctaatcgcttctctggctccaagtctggcaacacggcctccctgaccatctctgggctccaggctgaggacgag

SEQ ID NO: 1825 - DNA, 255 bp, Homo sapiens
  source 1..255: mol_type = other DNA
caggtgcagctgcaggagtcgggcccaggactggtgaagccttcggagaccctgtccctcacctgcactgtctctggtgcctccatcagtaatttctactggagctggatccggcagcccccagggaagggactggagtggattgggtatatctattatagtgggagcaccaactacaacccctccctcaagagtcgagtcaccatgtcactagacacgtccaagaaccagttctccctgaatctgagctctgtg

SEQ ID NO: 1826 - DNA, 255 bp, Homo sapiens
  source 1..255: mol_type = other DNA
gaaattgtgttgacgcagtctccaggcaccctgtctttgtctccaggggaaagagccaccctctcctgcagggccagtcagagtgttagcagcaactacttagcctggtaccagcagaaacctggccaggctcccaggctcctcatctatggtgcatccagcagggccactggcatcccagacaggttcagtggcagtgggtctgggacagacttcactctcaccatcagcagactggagcctgaagattttgca

SEQ ID NO: 1827 - DNA, 255 bp, Homo sapiens
  source 1..255: mol_type = other DNA
caggtgcagctggtgcagtctggggctgaggtgaagaagcctggggcctcagtgaaggtctcctgcaaggcttctggatacgccttcaccagttatgatatcaactgggtgcgacaggccactggacaagggcttgagtggatgggatggatgaaccctaacagtggtgacacattctatgcacagaagttccagggcagagtcaccatgaccaggagcacctccataagcacagcctacatggagctgagcagc

SEQ ID NO: 1828 - DNA, 255 bp, Homo sapiens
  source 1..255: mol_type = other DNA
tcttctgagctgactcaggaccctgctgtgtctgtggccttgggacagacagtcaggatcacatgccaaggagagaacctcagaagctactatgcaacctggtaccagcagaagccaggacaggcccctatacttgtcatctatggtaaaaacaaccggccctcagggatcccagaccgattctctggctccagctcaggaaacacagcttccttgaccatcactggggctcaggcggaagatgaggctgactat

SEQ ID NO: 1829 - DNA, 255 bp, Homo sapiens
  source 1..255: mol_type = other DNA
caggtgcagctggtggagtctgggggaggcgtggtccagcctgggaggtccctgagactctcctgtgtatcctctgaagtcaccttcaatagatatactatgcactgggtccgccaggctccaggcaaggggctggagtgggtggcatctatatcatttgaaggaagtgttaaaacctatgtagactccgtgaagggccgattcaccatctccagagacgattccaagaaaacgctgtttctgcagttgaacagc

SEQ ID NO: 1830 - DNA, 255 bp, Homo sapiens
  source 1..255: mol_type = other DNA
gatgttgtgctgactcagtctccactctccctgtccgtcacccttggacagccggcctccatctcctgcaggtctagtcaaagcctcgtttacagtgatggaagcacctacttgaattggtttcatcagaggccaggccaatctccaaggcgcctaatttataaggtttctaaccgggactctggggtcccagacagattcagcggcagtgggtcaggcactgatttcacactgaaaatcaccagggtggcggct

SEQ ID NO: 1831 - DNA, 255 bp, Homo sapiens
  source 1..255: mol_type = other DNA
gaggtgcagctggtgcagtctggagcagaaatcaaaaagccgggggagtctctgaagatctcctgccagggttctggatacatctttaccaacaactggatcggctgggtccgccagcagcccggcaaaggactggagtggatgggcatcatctatcctggtgactctgatgccagatatagcccgtccttccaaggccacgtcagcttctctgccgacaagtccatcaacaccgccttcctgcagtggcacagc

SEQ ID NO: 1832 - DNA, 255 bp, Homo sapiens
  source 1..255: mol_type = other DNA
gacatcgtgatgacccagtctccagactccctgactgtgtctctgggcgagagggccaccatcaactgcaagtccagccagaatattttaaccacctccaacaataagaattacttggcttggtaccaacaaaagccaggacagcctcctaagctgctcatttactgggcatctacccgggaatccggggtccctgaccgattcagtggcagcgggtctgggacagatttcactctcaccatcagcagcctgcag

SEQ ID NO: 1833 - DNA, 255 bp, Homo sapiens
  source 1..255: mol_type = other DNA
caggtgcagctggtgcagtctggggctgaggtgaagaagcctggggcctcagtgaaggtctcctgcaaggcttctggatacaccttcaccggctactatatgcactgggtgcgacaggcccctggacaagggcttgagtggatgggacggatcaaccctaacagtggtggcacaaactatgcacagaagtttcagggcagggtcaccatgaccagggacacgtccatcagcacagcctacatggagctgagcagg

SEQ ID NO: 1834 - DNA, 255 bp, Homo sapiens
  source 1..255: mol_type = other DNA
cagtctgccctgactcagcctgcctccgtgtctgggtctcctggacagtcgatcaccatctcctgcactggaaccagcagtgacgttggtggttataactatgtctcctggtaccaacagcacccaggcaaagcccccaaactcatgatttatgaggtcagtaatcggccctcaggggtttctaatcgcttctctggctccaagtctggcaacacggcctccctgaccatctctgggctccaggctgaggacgag

SEQ ID NO: 1835 - DNA, 255 bp, Homo sapiens
  source 1..255: mol_type = other DNA
gaggtgcagctggtggagtccgggggaggcttagttcagcctggggggtccctgagactctcctgtgcagcctctggattcaccttcagtagctactggatgcactgggtccgccaagctccagggaaggggctggtgtgggtctcacgtattaatagtgatgggagtagcacaagctacgcggactccgtgaagggccgattcaccatctccagagacaacgccaagaacacgctgtatctgcaaatgaacagt

SEQ ID NO: 1836 - DNA, 255 bp, Homo sapiens; identical to SEQ ID NO: 1806
  source 1..255: mol_type = other DNA

SEQ ID NO: 1837 - DNA, 255 bp, Homo sapiens
  source 1..255: mol_type = other DNA
caggtgcagctggtgcagtctggggctgaggtgaagaagcctggggcctcagtgaaggtttcctgcaagacatctggatacacgttcaccaactactttatgcactgggtgcgacaggcccccggacaaggccttgagtggatgggaataatcaaccctagtggtggtagcgcaagctacgcacagaagttccagggcagaatcaccatgaccagcgacacgtccacgagcacagtgtacatggaactgagcagc

SEQ ID NO: 1838 - DNA, 255 bp, Homo sapiens
  source 1..255: mol_type = other DNA
gaaattgtgttgacacagtctccagccaccctgtctttgtctccaggggaaagagccaccctctcctgcagggccagtcagagttttagcaactacttagcctggtaccaacagaaacctggccaggctcccaggctcctcatctatgatgcatccaacagggccactggcatcccagccaggttcagtggcagtgggtctgggacagacttcactctcaccatcagcagcctagagcctgaagattttgcagtt

SEQ ID NO: 1839 - DNA, 255 bp, Homo sapiens
  source 1..255: mol_type = other DNA
caggtgcacctggtgcagtctggggctgagatcaggaagcctggggcctcagtgatggtctcctgcaaggcttctggatacaccttcaccgactactatatacactgggtgcgacaggcccctggacaagggcttgagtggatggggtggatcaaccctaacagtggtggcacaaactatgcacagaaatttcagggcagggtcaccatgaccagggacacgtccatcagaacagcctacatggaactgagcagg

SEQ ID NO: 1840 - DNA, 255 bp, Homo sapiens
  source 1..255: mol_type = other DNA
caatctgccctgactcagcctgcctccgtgtctgggtctcctggacagtcgatcaccatctcctgcactggaaccagcagtgatgttgggagttataatcttgtctcctggtaccaacagcacccaggcaaggtccccaaactcataatttatgaggtcactaagcggccctcaggggtttctaatcgcttctctggctccaagtctggcaacacggcctccctgacaatctctgggctccaaactgaggacgag

SEQ ID NO: 1841 - DNA, 255 bp, Homo sapiens
  source 1..255: mol_type = other DNA
gaggtgcagctgttggagtctgggggaggcttggtacagcctggggggtccctgagactctcatgtgcagcctctggattcacctttagtagttatgtcttgagctgggtccgccaggctccagggaaggggctggaatgggtctcagctattagtggtagtggtggtatcacatattacgcagactccgtgaagggccgcttcaccatctccagagacaattccaagaacacactgtatctgcaaatgaacagt

SEQ ID NO: 1842 - DNA, 255 bp, Homo sapiens
  source 1..255: mol_type = other DNA
gacatccagatgacccagtctccatcctccctgtctgcatctgtaggagacagagtcaccatcacttgccgggcaagtcagagcattagcacctatttaaattggtatcagcagaaaccagggaaagcccctaagctcctgatctatgctgcatccagtttgcaaagtggggtcccatcaaggttcagtggcagtggatctgggacagatttcactctcaccatcagcagtctgcaacctgaagattttgcaact

SEQ ID NO: 1843 - DNA, 255 bp, Homo sapiens
  source 1..255: mol_type = other DNA
caggtgcagctggtgcagtctggggctgaggtgaagaagcctggggcctcagtgaaggtctcctgcaaggcttctggatacaccttcaccggctactttattcactgggtgcgacaggcccctggacaagggcttgaatatatgggatggatcaaccctaatagtgctggcacaaactatgcacagaagtttcagggcagggtcaccatgaccggggacacgtccatcagcacagtctacatggagctgagcagg

SEQ ID NO: 1844 - DNA, 255 bp, Homo sapiens
  source 1..255: mol_type = other DNA
cagtctgccctgactcagcctgcctccgtgtctgggtctcctggacagtcgatcaccatctcctgcactggaaccagcagtgatgttgggagttataaccttgtctcctggtatcaacagcacccaggcaaagcccccaaactcatgatttatgaggtcagtaagcggccctcaggggtttctaatcgcttctctggctccaagtctggcaacacggcctccctgacaatctctgggctccaggctgaggacgag

SEQ ID NO: 1845 - DNA, 255 bp, Homo sapiens
  source 1..255: mol_type = other DNA
gaggtgcagctgttggagtctgggggaggcttggtacagcctggggggtccctgagactctcctgtgtagcctctagattcacctttagcgactacgccatgagctgggtccgccagcctccagggaaggggctggagtgggtctcaagtattagtggtagtggtggtattacttactacgcagactccgtgaagggccggttcaccatctccagagacaattccaagaacacactgtatctgcaaataaagagc

SEQ ID NO: 1846 - DNA, 255 bp, Homo sapiens
  source 1..255: mol_type = other DNA
cagactgtggtgactcaggagccctcactgactgtgtccccaggagggacagtcactctcacctgtgcttccagtactggaacagtcaccagtgctttctttccaaactggttccagcagaaacctggacaagcacccagggcactgatttatagtacaaccaacaaatactcctggacccctgcccggttctcaggctccctccttgggggcaaagctgccctgacactgtcaggtgtgcagcctgaggacgag

SEQ ID NO: 1847 - DNA, 255 bp, Homo sapiens
  source 1..255: mol_type = other DNA
caggtgcagctacagcagtggggcgcgggactgttgaagccttcggagaccctgtccctcacctgcgctgtctatggtgcgtccgtcagtggttacttctggagctggatccgccagcccccagggaaggggctggagtggattggagaaatcaatcgttttggaagcaccaactacaacccgtccctcaagagtcgagtcaccttatcagtggacacgtccaggaaccagttctccctgaagctgggctctgtg

SEQ ID NO: 1848 - DNA, 255 bp, Homo sapiens
  source 1..255: mol_type = other DNA
gaaatagtgatgacgcagtctccagccaccctgtctgtgtctccaggggaaagggccaccctctcctgcagggccagtcagagtattaagagcaacttagcctggtaccaacaaaaacctggccaggctcccaggctcctcatctatggtgcatccaccagggccactggtatcccagccaggttcagtggcagtgggtctgggacagagttcactctcaccatcagccgcctgcagtctgaagattttgcactt

SEQ ID NO: 1849 - DNA, 255 bp, Homo sapiens
  source 1..255: mol_type = other DNA
cagatcaccttgaaggagtctggtcctacgctggtgaaacccacacagaccctcacgctgacctgcaccttctctgggttctcattcaccagtagtggagtgggtgtgggctggatccgtcagcccccaggaaaggccatggagtggcttgcactcatttattgggatgatgataagcgttacagcccatctctgaagagcaggctcaccatcaccaaggacacctccaaaaaccaggtggtccttaaaatgacc

SEQ ID NO: 1850 - DNA, 255 bp, Homo sapiens
  source 1..255: mol_type = other DNA
cagtctgccctgactcagcctgcctccgtgtctgggtctccaggacagtcgatcaccatctcctgcactggaaccagcagtgacgttggtggttataactatgtctcctggtaccaacaacacccaggcaaagcccccaaactcatgatttatgaggtcagtaatcggccctcaggggtccctgatcgcttctctggctccaagtctggcaacacggcctccctgaccatctctgggctccaggctgaggacgag

SEQ ID NO: 1851 - DNA, 255 bp, Homo sapiens
  source 1..255: mol_type = other DNA
gaggtgcagctggtggagactggaggaggcttgatccagcctggggggtccctgagactctcctgtgcagcctctgggatcaccgtcagtagcaactacatgaactgggtccgcctggctccagggaaggggctggagtgggtctcactcatttatagcggtggtagcacattctacgcagactccgtgaagggccgattcaccatctccagagacaattccaagaacacgctgtatcttcaaatgaacagcctg

SEQ ID NO: 1852 - DNA, 255 bp, Homo sapiens
  source 1..255: mol_type = other DNA
gacatccagttgacccagtctccatccttcctgtctgcatctgtaggagacagagtcaccatcacttgccgggccagtcagggcattagcagttatttagcctggtatcagctacaaccagggaaagcccctaagctcctgatctatgctgcatccactttgcaaagtggggtcccatcaaggttcagcggcagtggatctgggacagaattcactctcacaatcagcagcctgcagcctgaagattttgcaact

SEQ ID NO: 1853 - DNA, 255 bp, Homo sapiens
  source 1..255: mol_type = other DNA
caggtcaccttgagggagtctggtcctgcgctggtgaaacccacacagaccctcacactgacctgcaccttctctgggttctcactcaccactagtggaatgtgtgtgagctggatccgtcagcccccagggaaggccctggagtggcttgcacgcattgattgggatgatgataaatactacagcacatctctgaaggccaggctcaccatctccaaggacacctccaaaaaccaggtggtccttacaatgacc

SEQ ID NO: 1854 - DNA, 255 bp, Homo sapiens
  source 1..255: mol_type = other DNA
cagtctgtgctgactcagccaccctcagcgtctgggacccccgggcagagggtcaccatctcttgttctggaagcagctccaacatcggaagaaatactgtaaactggtaccagcagctcccaggaacggcccccaaactcctcatctatagtaataatcagcggccctcaggggtccctgaccgattctctggctccaagtctggcacctcagcctccctggccatcagtgggctccagtctgaggatgaggct

SEQ ID NO: 1855 - DNA, 255 bp, Homo sapiens
  source 1..255: mol_type = other DNA
cagctgcagctgcaggagtcgggcccaggactggtgaagccttcggaggccctgtccctcacctgcactgtctctggtggctccatcagcactagtaattactactggggctggatccgccagcccccagggaaggggctggagtggattgggagtatctattatcgtgggggcacccactacaacccgtccctcaagactcgagtcaccatatccgtagacacgtccaagaaccagttctccctgaagctgagc

SEQ ID NO: 1856 - DNA, 255 bp, Homo sapiens
  source 1..255: mol_type = other DNA
gaaattgtgttgacgcagtctccaggcaccctgtctttgtctccaggggaaagagccaccctctcctgcagggccagtcagagtgttagcagcagctacttagcctggtaccagcagaaacctggccaggctcccaggctcctcatctctgatgcatccagcagggccactggcatcccagacaggttcagtggcagtgggtctgggacagacttcactctcaccatcagcagactggagcctgaagattttgca

SEQ ID NO: 1857 - DNA, 255 bp, Homo sapiens
  source 1..255: mol_type = other DNA
cagctgcagctgcaggagtcgggcccaggactggtgaagccttcggagaccctgtccctcacctgcactgtctctggtggctccatcagcagtaataattactactggggctggatccgccagcccccagggaaggggctggagtggattgggagtatctattatagtggcagcacctactacaacccgtctctcaagagtcgagtcaccatgtccgtagacacgtccaagaaccagttctccctgaagctgagc

SEQ ID NO: 1858 - DNA, 255 bp, Homo sapiens
  source 1..255: mol_type = other DNA
cagtctgtgttgacgcagccgccctcagtgtctgcggccccaggacagaaggtcaccatctcctgctctggaagcagctccaacattgggaataattctgtatcctggtaccagcacctcccaggaacagcccccaaactcctcatctatgaaaataatgagcgaccctcagggattcctgaccgattctctggctccaagtctggcacgtcagccaccctgggcatcaccggactccagactggggacgaggcc

SEQ ID NO: 1859 - DNA, 255 bp, Homo sapiens
  source 1..255: mol_type = other DNA
caggtgcagctggtgcagtctggggctgaggtgaagaagcctggggcctcagtgaaggtctcctgcagggtttctggatacaccttcaccggctactatatacactgggtgcggcaggcccctggacaagggcttgagtggatgggatggatcaaccctaacagtggtggcacaaactatgcacagaagtttcagggcagggtcaccatgaccagggacacgtccatcaccacagcctacatggagctgagcagg

SEQ ID NO: 1860 - DNA, 255 bp, Homo sapiens
  source 1..255: mol_type = other DNA
cagtctgccctgactcagcctgcctccgtgtctgggtctcctggacagtcgatcaccatctcctgcactggaaccagcagtgatgttggtggttataactatgtctcctggtaccaacaatacccaggcaaagcccccaaactcatgatttatgatgtcagtaagcggccctcaggggtttctaatcgcttctctggctccaagtctggcaacacggcctccctgacaatctctgggctccaggcagaggacgag

SEQ ID NO: 1861 - DNA, 255 bp, Homo sapiens
  source 1..255: mol_type = other DNA
cagatcaccttgaaggagtctggtcctacgctggtgaaacccacacagaccctcacactgacctgcaccctctctggattctcactcagcactagtggagttagtgtgggctggatccgtcagcccccaggaaaggccctggaatggcttgcagtcattttttgggatgatgataagcgctacaacccatctctgaagagcaggctcaccatcgccaaggacacctccaaaagccaggtggtccttacaatgacc

SEQ ID NO: 1862 - DNA, 255 bp, Homo sapiens
  source 1..255: mol_type = other DNA
gacatccagatgacccagtctccatcttccgtgtctgcatctattggagacagagtcaccatcacttgtcgggcgagtcaggatattagcacctggttagcctggtatcagcaaaaaccagggagagcccctaacctcctgatctatggtgcatccagcttgcaaagtggggtcccatcaaggttcagcggcagtggatctgggacagatttcactctcaccatcagcagcctgcagcctgaagattttgcaact

SEQ ID NO: 1863 - DNA, 255 bp, Homo sapiens
  source 1..255: mol_type = other DNA
caggtgcagctgcaggagtcgggcccaggactggtgaagccttcacagaccctgtctctcacctgctctgtctctggtggctccatcagcagtggtggttactactggagctggatccgccagcacccagggaagggcctggagtggattgggtacatgtattacagtgggagcacttattataacccgtccctcaagagtcgagttaccatattcgtggacacgtctaagaaccacttctccctgaaactgacc

SEQ ID NO: 1864 - DNA, 255 bp, Homo sapiens
  source 1..255: mol_type = other DNA
gacgtccagatgacccagtctccttccaccctgtctgcatctataggagacagagtcaccatcacttgccgggccagtcagagtattagtggctggttggcctggtatcagcagagaccagggaaagcccctaaactcctgatctatagggcgtctagtttagattttggggtcccatcaaggttcagcggcaatggatctgggacagaattcactctcaccatcagcagcctgcagcctgatgattttgcaact

SEQ ID NO: 1865 - DNA, 255 bp, Homo sapiens
  source 1..255: mol_type = other DNA
gaggtgcagctggtggagtctggaggaggcttgatccagcctggggggtccctgagactctcctgtgcagcctctgggttcaccgtcagtagcaactacatgagctgggtccgccaggctccagggaaggggctggagtgggtctcagttatttatagcggtggtagtacatactacgcagactccgtgaagggccgattcaccatctccagagacaattccaagaacacgctgtatcttcaaatgaacagcctg

SEQ ID NO: 1866 - DNA, 255 bp, Homo sapiens
  source 1..255: mol_type = other DNA
gacatccagatgacccagtctccatcctccctgtctgcatctgtaggagacagagtcaccatcacttgccaggcgagtcaggacattagcgactatttaaattggtatcagcagaaaccagggaaagcccctaagctcctgatctacgatgcatccaatttggaaacaggggtcccatcaaggttcagtggaagtggatctgggacagattttactttcaccatcagcagcctgcagcctgaagatattgcaaca

SEQ ID NO: 1867 - DNA, 255 bp, Homo sapiens
  source 1..255: mol_type = other DNA
caggtgcagctggtgcagtctggggctgaggtgaagaagcctggggcctcagtgaaagtctcctgtaagacttctggatacaccttcaccggcttctatttgcactggctgcgacaggcccctggacaagggcttgagtggatgggacgaatcaaccctaacaccggtgacacagactatgcacagaagtttcagggcagggtcaccatgaccagggacacctccatcagcacagcctacatggaactgagcagg

SEQ ID NO: 1868 - DNA, 255 bp, Homo sapiens
  source 1..255: mol_type = other DNA
gacatccagatgacccagtctccatcttccgtgtctgcatctgtaggggacagagtcaccatcacttgtcgggcgagtcagggtattagcagctggttagcctggtatcaacagaaaccagggaaagcccctaaggtcctcatttttgctgcatccagtttgcaaagtggggtcccatcaaggttcagcggcagtggatctgggacagatttcactctcaccatcaccagcctgcagcctgaagattttgcaact

SEQ ID NO: 1869 - DNA, 255 bp, Homo sapiens
  source 1..255: mol_type = other DNA
gaggtgcaactggtggagtctgggggaggcttggtccagcctggggggtccctgagactctcctgtgcagcctctggattactcgtcagtagaaattacatgaactgggtccgccaggctccagggaaggggctggaatgggtctcaattatttatagtggtggcagcacattctacgcagactccgtggagggccgattcaccatctccagagacgagtccaagaacacactgtatcttcaaatgaacagtctg

SEQ ID NO: 1870 - DNA, 255 bp, Homo sapiens
  source 1..255: mol_type = other DNA
cctatgaactgactcagccactctcagtgtcaatggccctgggacagacggccaggatttcctgtgggggagacaacgtgggaagtcaaaatgtgcactggtaccagcagaggccaggccaggcccctgtgctggtcatctatagggatagcaaccggccctctgggatccctgagcgattctctggctccaagtcggggaacacggccaccctgaccatcagcagagcccaagccggggatgaggctgactatt

SEQ ID NO: 1871 - DNA, 255 bp, Homo sapiens
  source 1..255: mol_type = other DNA
caggtgcagctgcaggagtcgggcccaggactggtgaagccttcggggaccctgtccctcacctgcgctgtctctggtggctccatcagtaataataactggtggatttgggtccgccagcccccagggaaggggctggagtggattggggaaatccatcatagtgggagcaccgactacaacccgtccctcaagagtcgagtcaccatatcaatagacaagtccaagaaccagttctccctgaggctgagctct

SEQ ID NO: 1872 - DNA, 255 bp, Homo sapiens
  source 1..255: mol_type = other DNA
gagactgtgttgacacagtctccaggcaccctgtctttgtctccgggggaaagagccaccctctcctgcagggccagtcagagtgttagcagcagttatataacctggtaccagcagaaacctggccaggctcccaggctcctcatctatggtgcatccagcagggccactggcatcccagacaggttcagtggcagtgggtctgggacagacttcactctcaccatcagtagactggagcctgaagatttcgca

SEQ ID NO: 1873 - DNA, 255 bp, Homo sapiens
  source 1..255: mol_type = other DNA
caggtccagctggtgcagtctggggctgaggtggtgaagcctgggtcctcggtgaaggtctcctgcaaggcctctggaggcaccttcaccaggtacgctattagctgggtgcgacaggcccccggacaagggcctgagtggatgggaaggatcatccctatgtttggaatagcaaactacgcacagaggttccagggcagagtcacgatgaccgcggacaaatccacgagcactgcctacatggagctgagcagc

SEQ ID NO: 1874 - DNA, 255 bp, Homo sapiens
  source 1..255: mol_type = other DNA
gaaattgtgttgacgcagtctccaggcaccctgtctttgtctccaggggaaagagtcaccctctcctgcagggccagtcagagtattagcagcaacttcttagcctggtaccagcagaaacctggccaggctcccaggctcctcatctctggtgcatccagcagggccactggcatcccagacaggttcagtggcggtgggtctgggacagacttcactctcaccatcagcagactggagcctgaagattttgca

SEQ ID NO: 1875 - protein, 5 aa, synthetic construct
GSGGS

SEQ ID NO: 1876 - protein, 4 aa, synthetic construct
GGGS

SEQ ID NO: 1877 - protein, 4 aa, synthetic construct
GGSG

SEQ ID NO: 1878 - protein, 5 aa, synthetic construct
GGSGG

SEQ ID NO: 1879 - protein, 5 aa, synthetic construct
GSGSG

SEQ ID NO: 1880 - protein, 5 aa, synthetic construct
GSGGG

SEQ ID NO: 1881 - protein, 5 aa, synthetic construct
GGGSG

SEQ ID NO: 1882 - protein, 5 aa, synthetic construct
GSSSG

SEQ ID NO: 1883 - protein, 31 aa, synthetic construct
RNYMNIIYSGGSTFYADSVEGDLSDYGGIDC

SEQ ID NO: 1884 - DNA, 93 bp, synthetic construct
  source 1..93: mol_type = other DNA
agaaattacatgaacattatttatagtggtggcagcacattctacgcagactccgtggagggcgatctctccgactacggtgggattgactgc

SEQ ID NO: 1885 - protein, 27 aa, synthetic construct
GGDNVGSQNVHRDSNRPSQVWDSSTVA

SEQ ID NO: 1886 - DNA, 81 bp, synthetic construct
  source 1..81: mol_type = other DNA
gggggagacaacgtgggaagtcaaaatgtgcacagggatagcaaccggccctctcaggtgtgggacagcagcactgtggct

SEQ ID NO: 1887 - protein, 34 aa, synthetic construct
NYAMTAISGGGGSTDYADSVKGDLFGSGWSLFDN

SEQ ID NO: 1888 - DNA, 102 bp, synthetic construct
  source 1..102: mol_type = other DNA
aactatgccatgaccgctattagtggtggtggtgggagcacagactacgcagactccgtgaagggcgatctattcggcagtggctggtccctctttgacaac

SEQ ID NO: 1889 - protein, 33 aa, synthetic construct
KSSQSVLYSSNNKNYLAWASTRESQQYYSPPIT

SEQ ID NO: 1890 - DNA, 99 bp, synthetic construct
  source 1..99: mol_type = other DNA
aagtccagccagagtgtcttatacagctccaacaataagaactacttagcttgggcatctacccgggaatcccagcaatattatagtcctcctatcact

SEQ ID NO: 1891 - protein, 41 aa, synthetic construct
TSNYYWGSIYYRGGTHYNPSLKTHTYFYDIVGAAVWEPFDI

SEQ ID NO: 1892 - DNA, 123 bp, synthetic construct
  source 1..123: mol_type = other DNA
actagtaattactactggggcagtatctattatcgtgggggcacccactacaacccgtccctcaagactcatacctatttctatgatatcgtgggggcagcggtttgggaaccttttgatatc

SEQ ID NO: 1893 - protein, 29 aa, synthetic construct
RASQSVSSSYLADASSRATQQYGSSPPWT

SEQ ID NO: 1894 - DNA, 87 bp, synthetic construct
  source 1..87: mol_type = other DNA
agggccagtcagagtgttagcagcagctacttagccgatgcatccagcagggccactcagcagtatggtagctcacctccgtggacg

1. An antibody or antigen binding fragment comprising a heavy chain variable region and a light chain variable region:
(i) wherein the heavy chain variable region comprises a HCDR1, HCDR2, and HCDR3 having at least 80% sequence identity to the HCDR1, HCR2, HCR3 of SEQ ID NOs: 1565, 1566, and 1567 and wherein the light chain variable region comprises a LCDR1, LCDR2, and LCDR3 having at least 80% sequence identity to the LCDR1, LCDR2, and LCDR3 of SEQ ID NOs: 1572, 1573, and 1574;
(ii) wherein the heavy chain variable region comprises a HCDR1, HCDR2, and HCDR3 having at least 80% sequence identity to the HCDR1, HCR2, HCR3 of SEQ ID NOs: 1457, 1458, and 1459 and wherein the light chain variable region comprises a LCDR1, LCDR2, and LCDR3 having at least 80% sequence identity to the LCDR1, LCDR2, and LCDR3 of SEQ ID NOs: 1464, 1465, and 1466; or
(iii) wherein the heavy chain variable region comprises a HCDR1, HCDR2, and HCDR3 having at least 80% sequence identity to the HCDR1, HCR2, HCR3 of SEQ ID NOs: 1492, 243, and 1493 and wherein the light chain variable region comprises a LCDR1, LCDR2, and LCDR3 having at least 80% sequence identity to the LCDR1, LCDR2, and LCDR3 of SEQ ID NOs: 1497, 1498, and 1499.

2. The antibody or antigen binding fragment of claim 1:
(i) wherein the heavy chain variable region comprises a HCDR1, HCDR2, and HCDR3 having the amino acid sequence of SEQ ID NOs: 1565, 1566, and 1567 and wherein the light chain variable region comprises a LCDR1, LCDR2, and LCDR3 having the amino acid sequence of SEQ ID NOs: 1572, 1573, and 1574;
(ii) wherein the heavy chain variable region comprises a HCDR1, HCDR2, and HCDR3 having the amino acid sequence of SEQ ID NOs: 1457, 1458, and 1459 and wherein the light chain variable region comprises a LCDR1, LCDR2, and LCDR3 having the amino acid sequence of SEQ ID NOs: 1464, 1465, and 1466; or
(iii) wherein the heavy chain variable region comprises a HCDR1, HCDR2, and HCDR3 having the amino acid sequence of SEQ ID NOs: 1492, 243, and 1493 and wherein the light chain variable region comprises a LCDR1, LCDR2, and LCDR3 having the amino acid sequence of SEQ ID NOs: 1497, 1498, and 1499.

3. The antibody or antigen binding fragment of claim 1 or 2:
(i) wherein the heavy chain comprises an amino acid sequence with at least 80% sequence identity to SEQ ID NO: 1563 or 1564 and/or the light chain comprises an amino acid sequence with at least 80% sequence identity to SEQ ID NO:1570 or 1571;
(ii) wherein the heavy chain comprises an amino acid sequence with at least 80% sequence identity to SEQ ID NO: 1455 or 1456 and/or the light chain comprises an amino acid sequence with at least 80% sequence identity to SEQ ID NO:1462 or 1463; or
(iii) wherein the heavy chain comprises an amino acid sequence with at least 80% sequence identity to SEQ ID NO: 1490 or 1491 and/or the light chain comprises an amino acid sequence with at least 80% sequence identity to SEQ ID NO: 1495 or 1496.

4. The antibody or antigen binding fragment of claim 3:
(i) wherein the heavy chain comprises the amino acid sequence of SEQ ID NO: 1563 or 1564 and/or the light chain comprises the amino acid sequence of SEQ ID NO: 1570 or 1571;
(ii) wherein the heavy chain comprises the amino acid sequence of SEQ ID NO: 1455 or 1456 and/or the light chain comprises the amino acid sequence of SEQ ID NO: 1462 or 1463; or
(iii) wherein the heavy chain comprises the amino acid sequence of SEQ ID NO: 1490 or 1491 and/or the light chain comprises the amino acid sequence of SEQ ID NO: 1495 or 1496.

5. The antibody or antigen binding fragment of any one of claims 1-4, wherein the antibody or antigen binding fragment comprises:
(i) a heavy chain framework region (HFR) 1, HFR2, HFR3, and HFR4 and light chain framework region (LFR) 1, LFR2, LFR3, and LFR4, and wherein the HFR1, HFR2, HFR3, and HFR4 comprises an amino acid sequence with at least 80% sequence identity to SEQ ID NOs: 1568, 130, 1569, and 60, respectively, and the LFR1, LFR2, LFR3, and LFR4 comprises an amino acid sequence with at least 80% sequence identity to SEQ ID NOs: 1575, 950, 1576, and 69;
(ii) a heavy chain framework region HFR1, HFR2, HFR3, and HFR4 and light chain framework region LFR1, LFR2, LFR3, and LFR4, and wherein the HFR1, HFR2, HFR3, and HFR4 comprises an amino acid sequence with at least 80% sequence identity to SEQ ID NOs: 1460, 1461, 146, and 60, respectively, and the LFR1, LFR2, LFR3, and LFR4 comprises an amino acid sequence with at least 80% sequence identity to SEQ ID NOs: 1467, 1468, 1469, and 53; or
(iii) a heavy chain framework region HFR1, HFR2, HFR3, and HFR4 and light chain framework region LFR1, LFR2, LFR3, and LFR4, and wherein the HFR1, HFR2, HFR3, and HFR4 comprises an amino acid sequence with at least 80% sequence identity to SEQ ID NOs: 245, 7, 1494, and 44, respectively, and the LFR1, LFR2, LFR3, and LFR4 comprises an amino acid sequence with at least 80% sequence identity to SEQ ID NOs: 1500, 1501, 1502, and 18.

6. The antibody or antigen binding fragment of any one of claims 1-5:
(i) wherein the HFR1, HFR2, HFR3, and HFR4 comprises the amino acid sequence of SEQ ID NOs: 1568, 130, 1569, and 60, and the LFR1, LFR2, LFR3, and LFR4 comprises the amino acid sequence of SEQ ID NOs: 1575, 950, 1576, and 69;
(ii) wherein the HFR1, HFR2, HFR3, and HFR4 comprises the amino acid sequence of SEQ ID NOs: 1460, 1461, 146, and 60, and the LFR1, LFR2, LFR3, and LFR4 comprises the amino acid sequence of SEQ ID NOs: 1467, 1468, 1469, and 53; or
(iii) wherein the HFR1, HFR2, HFR3, and HFR4 comprises the amino acid sequence of SEQ ID NOs: 245, 7, 1494, and 44, and the LFR1, LFR2, LFR3, and LFR4 comprises the amino acid sequence of SEQ ID NOs: 1500, 1501, 1502, and 18.

7. An antibody or antigen binding fragment comprising a heavy chain variable region and a light chain variable region, wherein the heavy chain variable region comprises a HCDR1, HCDR2, and HCDR3 having at least 80% sequence identity to the HCDR1, HCR2, HCR3 from a heavy chain variable region of a antibody clone of Table 1 and wherein the light chain variable region comprises a LCDR1, LCDR2, and LCDR3 having at least 80% sequence identity to the LCDR1, LCDR2, and LCDR3 from the light chain variable region of the same antibody clone of Table 1.

8. The antibody or antigen binding fragment of claim 7, wherein the heavy chain variable region comprises a HCDR1, HCDR2, and HCDR3 having the amino acid sequence of an of a HCDR1, HCDR2, and HCDR3 of a clone of Table 1 and wherein the light chain variable region comprises a LCDR1, LCDR2, and LCDR3 comprising the amino acid sequence of the LCDR1, LCDR2, and LCDR3 from the light chain variable region of the same clone of Table 1.

9. The antibody or antigen binding fragment of claim 7 or 8, wherein the HCDR1, HCDR2, HCDR2, LCDR1, LCDR2, and LCDR3 each comprise an amino acid sequence that has at least 80% sequence identity to an HCDR1, HCDR2, HCDR2, LCDR1, LCDR2, and LCDR3 of Table 1, wherein the HCDR1, HCDR2, HCDR2, LCDR1, LCDR2, and LCDR3 are from the same antibody clone.

10. The antibody or antigen binding fragment of claim 7 or 8, wherein the HCDR1, HCDR2, HCDR2, LCDR1, LCDR2, and LCDR3 each comprise the amino acid sequence of an HCDR1, HCDR2, HCDR2, LCDR1, LCDR2, and LCDR3 of Table 1, wherein the HCDR1, HCDR2, HCDR2, LCDR1, LCDR2, and LCDR3 are from the same antibody clone.

11. The antibody or antigen binding fragment of any one of claims 7-10, wherein the heavy chain variable region comprises an amino acid sequence with at least 80% sequence identity to a heavy chain variable region of an antibody clone of Table 1 and/or the light chain variable region comprises an amino acid sequence with at least 80% sequence identity to the light chain variable region of the same antibody clone of Table 1.

12. The antibody or antigen binding fragment of claim 11, wherein the heavy chain variable region comprises the amino acid sequence of a heavy chain variable region of an antibody clone of Table 1 and/or the light chain variable region comprises the amino acid sequence of the same antibody clone of Table 1.

13. The antibody or antigen binding fragment of any one of claims 7-12, wherein the antibody or antigen binding fragment comprises a heavy chain framework region (HFR) 1, HFR2, HFR3, and HFR4 and light chain framework region (LFR) 1, LFR2, LFR3, and LFR4, and wherein the HFR1, HFR2, HFR3, and HFR4 comprises an amino acid sequence with at least 80% sequence identity to an HFR1, HFR2, HFR3, and HFR4, respectively, of an antibody clone of Table 1, and the LFR1, LFR2, LFR3, and LFR4 comprises an amino acid sequence with at least 80% sequence identity to the LFR1, LFR2, LFR3, and LFR4, respectively, of the same antibody clone of Table 1.

14. The antibody or antigen binding fragment of any one of claims 7-12, wherein the HFR1, HFR2, HFR3, and HFR4 comprises the amino acid sequence of an HFR1, HFR2, HFR3, and HFR4, respectively, of an antibody clone of Table 1, and the LFR1, LFR2, LFR3, and LFR4 comprises the amino acid sequence of the LFR1, LFR2, LFR3, and LFR4, respectively, of the same antibody clone of Table 1.

15. The antibody or antigen binding fragment of any one of claims 7-14, wherein the antibody comprises a heavy chain and a light chain and wherein the heavy chain comprises an amino acid sequence with at least 70% sequence identity to a heavy chain of an antibody clone of Table 1 and the light chain comprises an amino acid sequence with at least 70% sequence identity to the light chain of the same antibody clone of Table 1.

16. The antibody or antigen binding fragment of claim 15, wherein the antibody comprises a heavy chain and a light chain and wherein the heavy chain comprises the amino acid sequence of an antibody clone of Table 1 and the light chain comprises the amino acid sequence of the same antibody clone of Table 1.

17. The antibody of any one of claims 1-16, wherein the antibody is human, chimeric, or humanized.

18. The antibody or antigen-binding fragment of any one of claims 1-17, wherein the antibody, or antigen binding fragment binds a SARS-CoV-2 protein with a K_{D} of about 10⁻⁶ nM to about 10⁻¹² pM.

19. The antibody or antigen binding fragment of any one of claims 1-18, wherein the antibody is a neutralizing antibody.

20. The antibody or antigen binding fragment of any one of claims 1-19, wherein the antibody is a human antibody, humanized antibody, recombinant antibody, chimeric antibody, an antibody derivative, a veneered antibody, a diabody, a monoclonal antibody, a single domain antibody, or a single chain antibody.

21. The antigen binding fragment of any one of claims 1-19, wherein the antigen binding fragment is a single chain variable fragment (scFv), F(ab′)2, Fab′, Fab, Fv, or rIgG.

22. A polypeptide comprising the antigen binding fragment of any one of claims 1-21.

23. The polypeptide of claim 22, wherein the polypeptide comprises at least two antigen binding fragments, wherein each antigen binding fragment is independently selected from an antigen binding fragment of any one of claims 1-21.

24. The polypeptide of claim 22 or 23, wherein the polypeptide is multivalent.

25. The polypeptide of any one of claims 22-24, wherein the polypeptide is bispecific.

26. A composition comprising the antibody or antigen binding fragment of any one of claims 1-25.

27. The composition of claim 26, wherein the composition comprises a pharmaceutical excipient.

28. The composition of claim 26 or 27, wherein the composition further comprises an adjuvant.

29. The composition of any one of claims 26-28, wherein the composition is formulated for parenteral, intravenous, subcutaneous, intramuscular, or intranasal administration.

30. The composition of any one of claims 26-29, wherein the composition comprises at least two antibodies or antigen binding fragments.

31. One or more nucleic acids encoding the antibody or antigen binding fragment of any one of claims 1-21 or the polypeptide of claim 25.

32. A nucleic acid encoding an antibody heavy chain, wherein the nucleic acid has at least 70% sequence identity to one of the nucleic acid sequences of a heavy chain of Table 2.

33. A nucleic acid encoding an antibody light chain, wherein the nucleic acid has at least 70% sequence identity to one of the nucleic acid sequences of a light chain of Table 2.

34. A vector comprising the nucleic acid(s) of any one of claims 31-33.

35. A host cell comprising the nucleic acid of any one of claims 31-33 or the vector of claim 34.

36. The host cell of claim 35, wherein the host cell is a human cell, B cell, T cell, Chinese hamster ovary, NS0 murine myeloma cell, or PER.C6 cell.

37. A method of a making a cell comprising transferring the nucleic acid(s) of any one of claims 31-33 or the vector of claim 34 into a cell.

38. The method of claim 37, wherein the method further comprises culturing the cell under conditions that allow for expression of a polypeptide from the nucleic acid.

39. The method of claim 38, wherein the method further comprising isolating the expressed polypeptide.

40. The method of any one of claims 37-39, wherein the cell is a human cell, B cell, T cell, Chinese hamster ovary, NS0 murine myeloma cell, or PER.C6 cell.

41. A method for producing a polypeptide comprising culturing cells comprising the nucleic acid(s) of any one of claims 31-33 or the vector of claim 34 and isolating polypeptides expressed from the nucleic acid.

42. The method of claim 41, wherein the cell is a human cell, B cell, T cell, Chinese hamster ovary, NS0 murine myeloma cell, or PER.C6 cell.

43. A method for treating or preventing a coronavirus infection in a subject, the method comprising administering to the subject, the antibody or antigen binding fragment of any one of claims 1-21, the polypeptide of claim 25, or the host cell of claim 35.

44. The method of claim 43, wherein the subject is a human subject.

45. The method of claim 43 or 44, wherein the coronavirus infection is SARS-CoV-2.

46. The method of claim 43 or 44, wherein the subject has one or more symptoms of a coronavirus infection.

47. The method of claim 43 or 44, wherein the subject does not have any symptoms of a coronavirus infection.

48. The method of any one of claims 43-47, wherein the subject has been diagnosed with a coronavirus infection.

49. The method of any one of claims 43-47, wherein the subject has not been diagnosed with a coronavirus infection.

50. The method of any one of claims 43-49, wherein the subject has been previously vaccinated for coronavirus.

51. The method of any one of claims 43-49, wherein the subject has not been previously vaccinated for coronavirus.

52. The method of any one of claims 43-51, wherein the antibody, antigen binding fragment, polypeptide, or cell is administered by parenteral, intravenous, subcutaneous, intramuscular, or intranasal administration.

53. The method of any one of claims 43-49, wherein the subject has been previously treated for a coronavirus infection.

54. The method of any one of claims 43-53, wherein the subject is administered an additional therapeutic.

55. The method of claim 54, wherein the additional therapeutic comprises a steroid or an anti-viral therapeutic.

56. The method of claim 55, wherein the additional therapeutic comprises dexamethasone or remdesivir.

57. A method for evaluating a sample from a subject, the method comprising contacting a biological sample from the subject, or extract thereof, with at least one antibody, antigen binding fragment, or polypeptide of any one of claims 1-25.

58. The method of claim 57, wherein the at least one antibody, antigen binding fragment, or polypeptide is operatively linked to a detectable label.

59. The method of claim 57 or 58, wherein the method further comprises incubating the antibody, antigen binding fragment, or polypeptide under conditions that allow for the binding of the antibody, antigen binding fragment, or polypeptide to antigens in the biological sample or extract thereof.

60. The method of any one of claims 57-59, wherein the method further comprises detecting the binding of an antigen to the antibody, antigen binding fragment, or polypeptide.

61. The method of any one of claims 57-60, wherein the method further comprises contacting the biological sample with at least one capture antibody, antigen, or polypeptide.

62. The method of claim 61, wherein the at least one capture antibody, antigen binding fragment, or polypeptide comprises at least one antibody of claims 7-25.

63. The method of claim 61 or 62, wherein the capture antibody is linked to a solid support.

64. The method of any one of claims 57-63, wherein the biological sample comprises a blood sample, urine sample, fecal sample, or nasopharyngeal sample.

65. A method for diagnosing a SARS-CoV-2 infection in a subject, the method comprising contacting a biological sample from the subject, or extract thereof, with at least one antibody, antigen binding fragment, or polypeptide of any one of claims 7-25.

66. The method of claim 65, wherein the at least one antibody, antigen binding fragment, or polypeptide is operatively linked to a detectable label.

67. The method of claim 65 or 66, wherein the method further comprises incubating the antibody, antigen binding fragment, or polypeptide under conditions that allow for the binding of the antibody, antigen binding fragment, or polypeptide to antigens in the biological sample or extract thereof.

68. The method of any one of claims 65-67, wherein the method further comprises detecting the binding of an antigen to the antibody, antigen binding fragment, or polypeptide.

69. The method of any one of claims 65-68, wherein the method further comprises contacting the biological sample with at least one capture antibody, antigen, or polypeptide.

70. The method of claim 69, wherein the at least one capture antibody, antigen, or polypeptide comprises at least one antibody, antigen, or polypeptide of claims 7-25.

71. The method of claim 69 or 70, wherein the capture antibody is linked to a solid support.

72. The method of any one of claims 65-71, wherein the biological sample comprises a blood sample, urine sample, fecal sample, or nasopharyngeal sample.
